United States Patent Application Publication US 2026/0357256 A1, published November 12, 2026 (application 19/484,352).

The application's sequence listing, which the Patent Office published only in electronic form, follows.

SEQUENCE LISTING (2598 sequences)

SEQ ID NO: 1 - RNA, 9985 nt, Homo sapiens
  source 1..9985: mol_type = mRNA
gcccccggtgctgaaccaagatggccggtggcggccgggccccggcgtgagccaagcgcgggctgcagccgggagatgccccagcccagcggccgctgagcccgacccgacagagccggcccggccgcctccggcccacctgcgagctcggagacatgtctctgctttgcgttggagtcaaaaaagccaagtttgatggtgcccaagagaaattcaacacgtacgtgaccctgaaagtgcagaatgtcaagagcacgaccatcgcggtgcggggcagccagcccagctgggagcaggatttcatgttcgagattaaccgtctggatttgggactgacggtggaggtgtggaataagggtctcatctgggacacaatggtgggcactgtgtggatcccactgaggaccatccgccagtccaatgaggagggccctggagagtggctgacgctggactcccaggtcatcatggcagacagtgagatctgtggcaccaaggaccccaccttccaccgcatcctcctggacacgcgctttgagctacccttagacattcctgaagaggaggctcgctactgggccaagaagctggagcagctcaatgctatgcgggaccaggatgaatattcgttccaagatgagcaagacaagcctctgcctgtccccagcaaccagtgctgcaactggaattattttggctggggtgagcagcacaacgatgaccccgacagtgcagtggatgatcgtgacagtgactaccgcagtgaaacgagcaacagcatcccgccgccctattatactacgtcacaacccaacgcctcagtccaccaatattctgttcgcccaccacccctgggctcccgggagtcctacagtgactccatgcacagttacgaggagttctctgagccacaagccctcagccccacgggtagcagccgctatgcctcttccggggagctgagccagggaagctctcagctgagcgaggacttcgaccctgacgagcacagcctgcagggctccgacatggaggatgagcgggaccgggactcctaccactcctgccacagctcggtcagctaccacaaagactcgcctcgctgggaccaggatgaggaagagctggaggaggacctggaggacttcctggaggaggaggagctgcctgaagatgaggaggagctggaggaggaggaggaggaggtgcctgacgatttgggcagctatgcccagcgtgaagacgtagctgtggctgagcccaaagacttcaaacgcatcagcctcccgccagctgccccagggaaggaggacaaggccccagtggcacccaccgaggcccccgacatggccaaggtggcccccaagccagccacgcccgacaaggtgcctgcagctgagcagatccctgaggctgagccacccaaggacgaggagagtttcaggccgagagaggatgaggaaggccaggaggggcaggactccatgtccagggccaaggccaactggctgcgtgccttcaacaaggtgcggatgcagctgcaggaggcccggggagaaggagagatgtctaaatccctatggttcaaaggcggcccagggggcggtctcatcatcatcgacagcatgccagacatccgcaagaggaaacctatcccactcgtgagcgacttggccatgtccctggtccagtccaggaaagcgggcatcacctcggccttggcctccagcacgttgaacaacgaggagctgaaaaaccacgtttacaagaagaccctgcaagccttaatctaccccatctcgtgcacgacgccacacaacttcgaagtgtggacggccaccacgcccacctactgctacgagtgcgaggggctgctgtggggcatcgcgaggcagggcatgcgctgcaccgagtgcggtgtcaagtgccacgagaagtgccaggacctgctcaacgccgactgcctgcagcgggctgcggagaagagctccaagcacggggcggaggaccggacacagaacatcatcatggtgctcaaggaccgcatgaagatccgggagcgcaacaagcccgagatcttcgagctcatccaggagatcttcgcggtgaccaagacggcgcacacgcagcagatgaaggcggtcaagcagagcgtgctggacggcacgtccaagtggtccgccaagatcagcatcaccgtggtctgcgcccagggcttgcaggcaaaggacaagacaggatccagtgacccctatgtcaccgtccaggtcgggaagaccaagaaacggacaaaaaccatctatgggaacctcaacccggtgtgggaggagaatttccactttgaatgtcacaattcctccgaccgcatcaaggtgcgcgtctgggacgaggatgacgacatcaaatcccgcgtgaaacagaggttcaagagggaatctgacgatttcctggggcagacgatcattgaggtgcggacgctcagcggcgagatggacgtgtggtacaacctggacaagcgaactgacaaatctgccgtgtcgggtgccatccggctccacatcagtgtggagatcaaaggcgaggagaaggtggccccgtaccatgtccagtacacctgtctgcatgagaacctgttccacttcgtgaccgacgtgcagaacaatggggtcgtgaagatcccagatgccaagggtgacgatgcctggaaggtttactacgatgagacagcccaggagattgtggacgagtttgccatgcgctacggcgtcgagtccatctaccaagccatgacccactttgcctgcctctcctccaagtatatgtgcccaggggtgcctgccgtcatgagcaccctgctcgccaacatcaatgcctactacgcacacaccaccgcctccaccaacgtgtctgcctccgaccgcttcgccgcctccaactttgggaaagagcgcttcgtgaaactcctggaccagctgcataactccctgcggattgacctctccatgtaccggaataacttcccagccagcagcccggagagactccaggacctcaaatccactgtggaccttctcaccagcatcaccttctttcggatgaaggtacaagaactccagagcccgccccgagccagccaggtggtaaaggactgtgtgaaagcctgccttaattctacctacgagtacatcttcaataactgccatgaactgtacagccgggagtaccagacagacccggccaagaagggggaagttctcccagaggaacaggggcccagcatcaagaacctcgacttctggtccaagctgattaccctcatagtgtccatcattgaggaagacaagaattcctacactccctgcctcaaccagtttccccaggagctgaatgtgggtaaaatcagcgctgaagtgatgtggaatctgtttgcccaagacatgaagtacgccatggaggagcacgacaagcatcgtctatgcaagagtgccgactacatgaacctccacttcaaggtgaaatggctctacaatgagtatgtgacggaacttcccgccttcaaggaccgcgtgcctgagtaccctgcatggtttgaacccttcgtcatccagtggctggatgagaatgaggaggtgtcccgggatttcctgcacggtgccctggagcgagacaagaaggatgggttccagcagacctcagagcatgccctattctcctgctccgtggtggatgttttctcccaactcaaccagagctttgaaatcatcaagaaactcgagtgtcccgaccctcagatcgtggggcactacatgaggcgctttgccaagaccatcagtaatgtgctcctccagtatgcagacatcatctccaaggactttgcctcctactgctccaaggagaaggagaaagtgccctgcattctcatgaataacactcaacagctacgagttcagctggagaagatgttcgaagccatgggaggaaaggagctggatgctgaagccagtgacatcctgaaggagcttcaggtgaaactcaataacgtcttggatgagctcagccgggtgtttgctaccagcttccagccgcacattgaagagtgtgtcaaacagatgggtgacatccttagccaggttaagggcacaggcaatgtgccagccagtgcctgcagcagcgtggcccaggacgcggacaatgtgttgcagcccatcatggacctgctggacagcaacctgaccctctttgccaaaatctgtgagaagactgtgctgaagcgagtgctgaaggagctgtggaagctggttatgaacaccatggagaaaaccatcgtcctgccgcccctcactgaccagacgatgatcgggaacctcttgagaaaacatggcaagggattagaaaagggcagggtgaaattgccaagccactcagacggaacccagatgatcttcaatgcagccaaggagctgggtcagctgtccaaactcaaggatcacatggtacgagaagaagccaagagcttgaccccaaagcagtgcgcggttgttgagttggccctggacaccatcaagcaatatttccacgcgggtggcgtgggcctcaagaagaccttcctggagaagagcccggacctgcaatccttgcgctatgccctgtcgctctacacgcaggccaccgacctgctaatcaagacctttgtacagacgcaatcggcccagggcttgggtgtagaagaccctgtgggtgaagtctctgtccatgttgagctgttcactcatccaggaactggggaacacaaggtcacagtgaaagtggtggctgccaatgacctcaagtggcagacttctggcatcttccggccgttcatcgaggtcaacatcattgggccccagctcagcgacaagaaacgcaagtttgcgaccaaatccaagaacaatagctgggctcccaagtacaatgagagcttccagttcacgctgagcgccgacgcgggtcccgagtgctatgagctgcaggtgtgcgtcaaggactactgcttcgcgcgcgaggaccgcacggtggggctggccgtgctgcagctgcgtgagctggcccagcgcgggagcgccgcctgctggctgccgctcggccgccgcatccacatggacgacacgggcctcacggtgctgcgaatcctctcgcagcgcagcaacgacgaggtggccaaggagttcgtgaagctcaagtcggacacgcgctccgccgaggagggcggtgccgcgcctgcgccttagcgcgggcggtcggccgagcggcactgcgcctgcgcggagggcgctgggcggggagggacggggcttgcgccttggtgggacctccccaggggcggggctcggggggctccacgccaagggtgggctgcgcctacgcccttgactcagctttcccttttggggaattaggaatggaggatgccccgccctctcgggaggccacgcccaagggcgcgacgaaggaaggagccacatccccaacttgaggccacgcccccagcacctagggggcattttgagctgggatgggggaaacctcgtccctatggaggaggccacatcccggggctctggtaccgggaggcaccacctcatgtcccctggaaaagccataagatgggacccagacccctgggaccccagaccaattgccaagtatggaaatctcagctccctcgagggggggccctgggcaaggggtagggctctctggagcgcccctctaggtggcctggggactggagggaccaggatgctggttggagggccccggaataccggagtccctttagatatttgtgcaaaaaataaatggggggaggggggaggatgggatttcaaaagcacatgcgcccttgggcgcccaaaccctgggggccgaggggacggctctggttccccacgctgcccctacttccctttgggagtttgcctctccctctcccccaacaaacccagtcctcatatcatagagttcaacacacccatttgacagatggcaaaactgaggcttaaagagctgcttgagacttggccaaggttccaggtgccataccctctgtgcccctcccttaggcctgtgtgccccatggaagggtgggctgagatcgggatgacctgacacagctccctattgctgctaattccccctcggcctcctccaaggggtgggaattccaggccaagacccctacttcgcctttccttctccggctgccaagcaggacctttgccctcagccctttctcctgggatctccatgggggatgccatgagggcctcccaccacaaaagagaatttgggatcccctggtcccaggtttctccatcccttcttccttttccagaattttccaaataggaaagaacagaaggagaccagaaactctaggggggagaaagagaatgagagaaagagaatgagagagagagaaacacaaacacagtgacacagtgagagcttagtctccaagagcctattcattgattcaaacacccaagccacaggatacctcagatggccctcttgccagctggaagctctttctccaatgagcaaagttacagtgacctggctggagttacctggtgcacataggaccttaggggaaagttcagcgtggactacacttgctctgggatctgcttttccacatgtgtgtatggcacgcctttttctgctggattgggaaggacaagattttgctgtgctagggagaaatgaaaacggggtgagctgagtagctgggtttctggaggatagaacatcagatggggaggctttccgaggtgaagaatgagagggaaccacttactagagagaaaagagctccaggcctggggaacagcacgtgcgaaggccaggagagaagaactgttgaaacaacgagaagggtggcacggctggagctgagccagcaagggggatcgtgaggagccttggggttggggagatctgcagaagcatcagaccaggcagggcctcgtacgcagtcctgaggagttttacttttattctaagacagttggggagctccaggagctgttttaagttggggagagactggattccagcctgcaaaagctgttttgtgaagactaaaaccagtgaggagaggtggaggtgctttggggacactgaaatggattcttggaaagattctgaaggctgtgttgaaaagacacctatagctgtggggacatgactataatcccagcatttggggagaccgaggctggcagatcacttaaggtcaggagtttgagaccagcctggccaacatggcgaaaccccatctctgctaaaaatacaaaaattagctgggtgcagtggtgcatgcctgtagtcccagctactcaggagactgaggcgggagaattgtttgaaccctggaggcagaggttgtagtgagtcgtgatcacacaactgcactccagcctgggcaacagaacaatactccattccctcccctctaccccaccaaaaaaaaaaaaaaatcctgcccttagatgagctctagggctgctgagtacagttgtcccagttgcacagtgcccaagggtttggcattgctaagaaggccacgtgcaaatcctagatattgagtgttgtatgtttgtgacgttggtttcccgacatgtgaatggcccaagtgtctggaagaagtggcgccactttctaatttgcttggagatgttgcatgtcccttaaattcagacaggtgcaggtaactggaggttctgaaccaaaggttaaaatgcaaattctcatacagggttgggaagttgtagccagggataagcttatgtgactgttatatggactgaggagcagatgtgaatttcgaaccatgacatggctgagggtaggggtcgggtggatggatgattcagggttgtaacccatagagcccaaaggggaagtgatctgtgacctggggtgagggtgatctggaagatttttggatggctggaaagaaatggggaagtcgagctgcctgagagagccaagttatttcccaaaagattccttaggagtctttctgttcaagacctccgtgtgtgtgtgtgtgtgtttagggttccccagcaatggcccaggcatgtgaaggaaacaagcttcttcagggaatatttgttgaatgagttttcctgactcccaggctagaactgtttttgcaatttccaccctcttttctttcccccagagaactcctattcgtccttcaaaacccatcacggaaacccctcttggagaaaaccctccttccttcccctcaggactttcccagccaccgtctctcctccagtccagcctgatgccatgggactgggggtttctctgtccagctctgtttctcccagactggggtctgaggactctcaggacccccaactttacctagcacaggctgggcacaagtgggtgacagggagtctacgcctagtggaattatgtattggggcagggtcagtgtgagaatacacatccgcatgcatgtctgtccatgtctgtccgtaccaaccttccccttccacacggacctgggcacataggaggtgtctgagcctgacacatgggacagagagtggacatggctgagacacggacagagaaaagacaaggagtccagggggctgaaagccttttgaaatcaggaagttcctgtattggcagaacaaagcccagagaggagcagggctttcctcaacgccacccagcaagtggacacagagcccggccttggatgacacctccagggttctgaaccctggacctcgctttatgcaaggagctggccccacatttccatgaatcggggaaacagcacaagaaggttggcctgtggcagggcaagggttaaaggggtgacattgagggatgcctcagagtcaaagtcccctgaccaagaggaatagagtagaaaacacagagacagagggtgagatcacgccccgatgaggacggagagagacagagatggagagagacatagaggtggaaatatacagagaaagataaatgcagagaccaaggcagggagtgtcgggggaagtaaagagggtgtcctgaagaaagaaggatctgttcactcttaccagtctgtcctcgaatgatttgcataaaatgaggaggtgcctgtccacacccccaattcctctctcaggccccagagcctgagacctcaccatgcccccatcagagatgcaaaaaactaaacacccaactagaaatccttgggacctctctcggctgggatctcagagcctttctgtcccctacccctaccccatgtgctgtcgattttgcagatggggacaacctggggcctcccggaactctgccaccctggggaagttgggggagggccttagtcccggatcacaaccccgtctgctccccagaatcctttcctaagaatcgttgaggaccaaagttgtctttgctgacacgtgttgcttttctctttgccttttattgtttcagagaaaaatcaagttgactgtgtcaagtaacaccccaccccttacccccgtccagccatagtggctctctggagacacaggtcacaggcggagggtcccctgatcatccccaaccacacagccagggggacttgacccctgtccacccctgtctcgtgctccctcagacccccacaaaccggccaagcagtccggggaggcttcccctccacacaactcttagcatgtgattgcagatgtgaaatcaaaacgttgtttgttttttgttttgttttgattctaccccgtcggtccagtgtctgcacagacgccttcatttctctgtaaatatgtgacttggaacaaatgtttaacacaaacgagaagtggtcatgaatgcatggtgttgagatgttttgcactattctgactttttggtctctgtaaaaatattttattaacagcagacattaaaaaaagaaaaaccacacaca

SEQ ID NO: 2 - RNA, 9973 nt, Homo sapiens
  source 1..9973: mol_type = mRNA
gcccccggtgctgaaccaagatggccggtggcggccgggccccggcgtgagccaagcgcgggctgcagccgggagatgccccagcccagcggccgctgagcccgacccgacagagccggcccggccgcctccggcccacctgcgagctcggagacatgtctctgctttgcgttggagtcaaaaaagccaagtttgatggtgcccaagagaaattcaacacgtacgtgaccctgaaagtgcagaatgtcaagagcacgaccatcgcggtgcggggcagccagcccagctgggagcaggatttcatgttcgagattaaccgtctggatttgggactgacggtggaggtgtggaataagggtctcatctgggacacaatggtgggcactgtgtggatcccactgaggaccatccgccagtccaatgaggagggccctggagagtggctgacgctggactcccaggtcatcatggcagacagtgagatctgtggcaccaaggaccccaccttccaccgcatcctcctggacacgcgctttgagctacccttagacattcctgaagaggaggctcgctactgggccaagaagctggagcagctcaatgctatgcgggaccaggatgaatattcgttccaagatgagcaagacaagcctctgcctgtccccagcaaccagtgctgcaactggaattattttggctggggtgagcagcacaacgatgaccccgacagtgcagtggatgatcgtgacagtgactaccgcagtgaaacgagcaacagcatcccgccgccctattatactacgtcacaacccaacgcctcagtccaccaatattctgttcgcccaccacccctgggctcccgggagtcctacagtgactccatgcacagttacgaggagttctctgagccacaagccctcagccccacgggtagcagccgctatgcctcttccggggagctgagccagggaagctctcagctgagcgaggacttcgaccctgacgagcacagcctgcagggctccgacatggaggatgagcgggaccgggactcctaccactcctgccacagctcggtcagctaccacaaagactcgcctcgctgggaccaggatgaggaagagctggaggaggacctggaggacttcctggaggaggaggagctgcctgaagatgaggaggagctggaggaggaggaggaggaggtgcctgacgatttgggcagctatgcccagcgtgaagacgtagctgtggctgagcccaaagacttcaaacgcatcagcctcccgccagctgccccagggaaggaggacaaggccccagtggcacccaccgaggcccccgacatggccaaggtggcccccaagccagccacgcccgacaaggtgcctgcagctgagcagatccctgaggctgagccacccaaggacgaggagagtttcaggccgagagaggatgaggaaggccaggaggggcaggactccatgtccagggccaaggccaactggctgcgtgccttcaacaaggtgcggatgcagctgcaggaggcccggggagaaggagagatgtctaaatccctatggttcaaaggcggcccagggggcggtctcatcatcatcgacagcatgccagacatccgcaagaggaaacctatcccactcgtgagcgacttgtccctggtccagtccaggaaagcgggcatcacctcggccttggcctccagcacgttgaacaacgaggagctgaaaaaccacgtttacaagaagaccctgcaagccttaatctaccccatctcgtgcacgacgccacacaacttcgaagtgtggacggccaccacgcccacctactgctacgagtgcgaggggctgctgtggggcatcgcgaggcagggcatgcgctgcaccgagtgcggtgtcaagtgccacgagaagtgccaggacctgctcaacgccgactgcctgcagcgggctgcggagaagagctccaagcacggggcggaggaccggacacagaacatcatcatggtgctcaaggaccgcatgaagatccgggagcgcaacaagcccgagatcttcgagctcatccaggagatcttcgcggtgaccaagacggcgcacacgcagcagatgaaggcggtcaagcagagcgtgctggacggcacgtccaagtggtccgccaagatcagcatcaccgtggtctgcgcccagggcttgcaggcaaaggacaagacaggatccagtgacccctatgtcaccgtccaggtcgggaagaccaagaaacggacaaaaaccatctatgggaacctcaacccggtgtgggaggagaatttccactttgaatgtcacaattcctccgaccgcatcaaggtgcgcgtctgggacgaggatgacgacatcaaatcccgcgtgaaacagaggttcaagagggaatctgacgatttcctggggcagacgatcattgaggtgcggacgctcagcggcgagatggacgtgtggtacaacctggacaagcgaactgacaaatctgccgtgtcgggtgccatccggctccacatcagtgtggagatcaaaggcgaggagaaggtggccccgtaccatgtccagtacacctgtctgcatgagaacctgttccacttcgtgaccgacgtgcagaacaatggggtcgtgaagatcccagatgccaagggtgacgatgcctggaaggtttactacgatgagacagcccaggagattgtggacgagtttgccatgcgctacggcgtcgagtccatctaccaagccatgacccactttgcctgcctctcctccaagtatatgtgcccaggggtgcctgccgtcatgagcaccctgctcgccaacatcaatgcctactacgcacacaccaccgcctccaccaacgtgtctgcctccgaccgcttcgccgcctccaactttgggaaagagcgcttcgtgaaactcctggaccagctgcataactccctgcggattgacctctccatgtaccggaataacttcccagccagcagcccggagagactccaggacctcaaatccactgtggaccttctcaccagcatcaccttctttcggatgaaggtacaagaactccagagcccgccccgagccagccaggtggtaaaggactgtgtgaaagcctgccttaattctacctacgagtacatcttcaataactgccatgaactgtacagccgggagtaccagacagacccggccaagaagggggaagttctcccagaggaacaggggcccagcatcaagaacctcgacttctggtccaagctgattaccctcatagtgtccatcattgaggaagacaagaattcctacactccctgcctcaaccagtttccccaggagctgaatgtgggtaaaatcagcgctgaagtgatgtggaatctgtttgcccaagacatgaagtacgccatggaggagcacgacaagcatcgtctatgcaagagtgccgactacatgaacctccacttcaaggtgaaatggctctacaatgagtatgtgacggaacttcccgccttcaaggaccgcgtgcctgagtaccctgcatggtttgaacccttcgtcatccagtggctggatgagaatgaggaggtgtcccgggatttcctgcacggtgccctggagcgagacaagaaggatgggttccagcagacctcagagcatgccctattctcctgctccgtggtggatgttttctcccaactcaaccagagctttgaaatcatcaagaaactcgagtgtcccgaccctcagatcgtggggcactacatgaggcgctttgccaagaccatcagtaatgtgctcctccagtatgcagacatcatctccaaggactttgcctcctactgctccaaggagaaggagaaagtgccctgcattctcatgaataacactcaacagctacgagttcagctggagaagatgttcgaagccatgggaggaaaggagctggatgctgaagccagtgacatcctgaaggagcttcaggtgaaactcaataacgtcttggatgagctcagccgggtgtttgctaccagcttccagccgcacattgaagagtgtgtcaaacagatgggtgacatccttagccaggttaagggcacaggcaatgtgccagccagtgcctgcagcagcgtggcccaggacgcggacaatgtgttgcagcccatcatggacctgctggacagcaacctgaccctctttgccaaaatctgtgagaagactgtgctgaagcgagtgctgaaggagctgtggaagctggttatgaacaccatggagaaaaccatcgtcctgccgcccctcactgaccagacggggaacctcttgagaaaacatggcaagggattagaaaagggcagggtgaaattgccaagccactcagacggaacccagatgatcttcaatgcagccaaggagctgggtcagctgtccaaactcaaggatcacatggtacgagaagaagccaagagcttgaccccaaagcagtgcgcggttgttgagttggccctggacaccatcaagcaatatttccacgcgggtggcgtgggcctcaagaagaccttcctggagaagagcccggacctgcaatccttgcgctatgccctgtcgctctacacgcaggccaccgacctgctaatcaagacctttgtacagacgcaatcggcccagggcttgggtgtagaagaccctgtgggtgaagtctctgtccatgttgagctgttcactcatccaggaactggggaacacaaggtcacagtgaaagtggtggctgccaatgacctcaagtggcagacttctggcatcttccggccgttcatcgaggtcaacatcattgggccccagctcagcgacaagaaacgcaagtttgcgaccaaatccaagaacaatagctgggctcccaagtacaatgagagcttccagttcacgctgagcgccgacgcgggtcccgagtgctatgagctgcaggtgtgcgtcaaggactactgcttcgcgcgcgaggaccgcacggtggggctggccgtgctgcagctgcgtgagctggcccagcgcgggagcgccgcctgctggctgccgctcggccgccgcatccacatggacgacacgggcctcacggtgctgcgaatcctctcgcagcgcagcaacgacgaggtggccaaggagttcgtgaagctcaagtcggacacgcgctccgccgaggagggcggtgccgcgcctgcgccttagcgcgggcggtcggccgagcggcactgcgcctgcgcggagggcgctgggcggggagggacggggcttgcgccttggtgggacctccccaggggcggggctcggggggctccacgccaagggtgggctgcgcctacgcccttgactcagctttcccttttggggaattaggaatggaggatgccccgccctctcgggaggccacgcccaagggcgcgacgaaggaaggagccacatccccaacttgaggccacgcccccagcacctagggggcattttgagctgggatgggggaaacctcgtccctatggaggaggccacatcccggggctctggtaccgggaggcaccacctcatgtcccctggaaaagccataagatgggacccagacccctgggaccccagaccaattgccaagtatggaaatctcagctccctcgagggggggccctgggcaaggggtagggctctctggagcgcccctctaggtggcctggggactggagggaccaggatgctggttggagggccccggaataccggagtccctttagatatttgtgcaaaaaataaatggggggaggggggaggatgggatttcaaaagcacatgcgcccttgggcgcccaaaccctgggggccgaggggacggctctggttccccacgctgcccctacttccctttgggagtttgcctctccctctcccccaacaaacccagtcctcatatcatagagttcaacacacccatttgacagatggcaaaactgaggcttaaagagctgcttgagacttggccaaggttccaggtgccataccctctgtgcccctcccttaggcctgtgtgccccatggaagggtgggctgagatcgggatgacctgacacagctccctattgctgctaattccccctcggcctcctccaaggggtgggaattccaggccaagacccctacttcgcctttccttctccggctgccaagcaggacctttgccctcagccctttctcctgggatctccatgggggatgccatgagggcctcccaccacaaaagagaatttgggatcccctggtcccaggtttctccatcccttcttccttttccagaattttccaaataggaaagaacagaaggagaccagaaactctaggggggagaaagagaatgagagaaagagaatgagagagagagaaacacaaacacagtgacacagtgagagcttagtctccaagagcctattcattgattcaaacacccaagccacaggatacctcagatggccctcttgccagctggaagctctttctccaatgagcaaagttacagtgacctggctggagttacctggtgcacataggaccttaggggaaagttcagcgtggactacacttgctctgggatctgcttttccacatgtgtgtatggcacgcctttttctgctggattgggaaggacaagattttgctgtgctagggagaaatgaaaacggggtgagctgagtagctgggtttctggaggatagaacatcagatggggaggctttccgaggtgaagaatgagagggaaccacttactagagagaaaagagctccaggcctggggaacagcacgtgcgaaggccaggagagaagaactgttgaaacaacgagaagggtggcacggctggagctgagccagcaagggggatcgtgaggagccttggggttggggagatctgcagaagcatcagaccaggcagggcctcgtacgcagtcctgaggagttttacttttattctaagacagttggggagctccaggagctgttttaagttggggagagactggattccagcctgcaaaagctgttttgtgaagactaaaaccagtgaggagaggtggaggtgctttggggacactgaaatggattcttggaaagattctgaaggctgtgttgaaaagacacctatagctgtggggacatgactataatcccagcatttggggagaccgaggctggcagatcacttaaggtcaggagtttgagaccagcctggccaacatggcgaaaccccatctctgctaaaaatacaaaaattagctgggtgcagtggtgcatgcctgtagtcccagctactcaggagactgaggcgggagaattgtttgaaccctggaggcagaggttgtagtgagtcgtgatcacacaactgcactccagcctgggcaacagaacaatactccattccctcccctctaccccaccaaaaaaaaaaaaaaatcctgcccttagatgagctctagggctgctgagtacagttgtcccagttgcacagtgcccaagggtttggcattgctaagaaggccacgtgcaaatcctagatattgagtgttgtatgtttgtgacgttggtttcccgacatgtgaatggcccaagtgtctggaagaagtggcgccactttctaatttgcttggagatgttgcatgtcccttaaattcagacaggtgcaggtaactggaggttctgaaccaaaggttaaaatgcaaattctcatacagggttgggaagttgtagccagggataagcttatgtgactgttatatggactgaggagcagatgtgaatttcgaaccatgacatggctgagggtaggggtcgggtggatggatgattcagggttgtaacccatagagcccaaaggggaagtgatctgtgacctggggtgagggtgatctggaagatttttggatggctggaaagaaatggggaagtcgagctgcctgagagagccaagttatttcccaaaagattccttaggagtctttctgttcaagacctccgtgtgtgtgtgtgtgtgtttagggttccccagcaatggcccaggcatgtgaaggaaacaagcttcttcagggaatatttgttgaatgagttttcctgactcccaggctagaactgtttttgcaatttccaccctcttttctttcccccagagaactcctattcgtccttcaaaacccatcacggaaacccctcttggagaaaaccctccttccttcccctcaggactttcccagccaccgtctctcctccagtccagcctgatgccatgggactgggggtttctctgtccagctctgtttctcccagactggggtctgaggactctcaggacccccaactttacctagcacaggctgggcacaagtgggtgacagggagtctacgcctagtggaattatgtattggggcagggtcagtgtgagaatacacatccgcatgcatgtctgtccatgtctgtccgtaccaaccttccccttccacacggacctgggcacataggaggtgtctgagcctgacacatgggacagagagtggacatggctgagacacggacagagaaaagacaaggagtccagggggctgaaagccttttgaaatcaggaagttcctgtattggcagaacaaagcccagagaggagcagggctttcctcaacgccacccagcaagtggacacagagcccggccttggatgacacctccagggttctgaaccctggacctcgctttatgcaaggagctggccccacatttccatgaatcggggaaacagcacaagaaggttggcctgtggcagggcaagggttaaaggggtgacattgagggatgcctcagagtcaaagtcccctgaccaagaggaatagagtagaaaacacagagacagagggtgagatcacgccccgatgaggacggagagagacagagatggagagagacatagaggtggaaatatacagagaaagataaatgcagagaccaaggcagggagtgtcgggggaagtaaagagggtgtcctgaagaaagaaggatctgttcactcttaccagtctgtcctcgaatgatttgcataaaatgaggaggtgcctgtccacacccccaattcctctctcaggccccagagcctgagacctcaccatgcccccatcagagatgcaaaaaactaaacacccaactagaaatccttgggacctctctcggctgggatctcagagcctttctgtcccctacccctaccccatgtgctgtcgattttgcagatggggacaacctggggcctcccggaactctgccaccctggggaagttgggggagggccttagtcccggatcacaaccccgtctgctccccagaatcctttcctaagaatcgttgaggaccaaagttgtctttgctgacacgtgttgcttttctctttgccttttattgtttcagagaaaaatcaagttgactgtgtcaagtaacaccccaccccttacccccgtccagccatagtggctctctggagacacaggtcacaggcggagggtcccctgatcatccccaaccacacagccagggggacttgacccctgtccacccctgtctcgtgctccctcagacccccacaaaccggccaagcagtccggggaggcttcccctccacacaactcttagcatgtgattgcagatgtgaaatcaaaacgttgtttgttttttgttttgttttgattctaccccgtcggtccagtgtctgcacagacgccttcatttctctgtaaatatgtgacttggaacaaatgtttaacacaaacgagaagtggtcatgaatgcatggtgttgagatgttttgcactattctgactttttggtctctgtaaaaatattttattaacagcagacattaaaaaaagaaaaaccacacaca

SEQ ID NO: 3 - RNA, 9970 nt, Homo sapiens
  source 1..9970: mol_type = mRNA
gcccccggtgctgaaccaagatggccggtggcggccgggccccggcgtgagccaagcgcgggctgcagccgggagatgccccagcccagcggccgctgagcccgacccgacagagccggcccggccgcctccggcccacctgcgagctcggagacatgtctctgctttgcgttggagtcaaaaaagccaagtttgatggtgcccaagagaaattcaacacgtacgtgaccctgaaagtgcagaatgtcaagagcacgaccatcgcggtgcggggcagccagcccagctgggagcaggatttcatgttcgagattaaccgtctggatttgggactgacggtggaggtgtggaataagggtctcatctgggacacaatggtgggcactgtgtggatcccactgaggaccatccgccagtccaatgaggagggccctggagagtggctgacgctggactcccaggtcatcatggcagacagtgagatctgtggcaccaaggaccccaccttccaccgcatcctcctggacacgcgctttgagctacccttagacattcctgaagaggaggctcgctactgggccaagaagctggagcagctcaatgctatgcgggaccaggatgaatattcgttccaagatgagcaagacaagcctctgcctgtccccagcaaccagtgctgcaactggaattattttggctggggtgagcagcacaacgatgaccccgacagtgcagtggatgatcgtgacagtgactaccgcagtgaaacgagcaacagcatcccgccgccctattatactacgtcacaacccaacgcctcagtccaccaatattctgttcgcccaccacccctgggctcccgggagtcctacagtgactccatgcacagttacgaggagttctctgagccacaagccctcagccccacgggtagcagccgctatgcctcttccggggagctgagccagggaagctctcagctgagcgaggacttcgaccctgacgagcacagcctgcagggctccgacatggaggatgagcgggaccgggactcctaccactcctgccacagctcggtcagctaccacaaagactcgcctcgctgggaccaggatgaggaagagctggaggaggacctggaggacttcctggaggaggaggagctgcctgaagatgaggaggagctggaggaggaggaggaggaggtgcctgacgatttgggcagctatgcccagcgtgaagacgtagctgtggctgagcccaaagacttcaaacgcatcagcctcccgccagctgccccagggaaggaggacaaggccccagtggcacccaccgaggcccccgacatggccaaggtggcccccaagccagccacgcccgacaaggtgcctgcagctgagcagatccctgaggctgagccacccaaggacgaggagagtttcaggccgagagaggatgaggaaggccaggaggggcaggactccatgtccagggccaaggccaactggctgcgtgccttcaacaaggtgcggatgcagctgcaggaggcccggggagaaggagagatgtctaaatccctatggttcaaaggcggcccagggggcggtctcatcatcatcgacagcatgccagacatccgcaagaggaaacctatcccactcgtgagcgacttgtccctggtccagtccaggaaagcgggcatcacctcggccttggcctccagcacgttgaacaacgaggagctgaaaaaccacgtttacaagaagaccctgcaagccttaatctaccccatctcgtgcacgacgccacacaacttcgaagtgtggacggccaccacgcccacctactgctacgagtgcgaggggctgctgtggggcatcgcgaggcagggcatgcgctgcaccgagtgcggtgtcaagtgccacgagaagtgccaggacctgctcaacgccgactgcctgcagcgggctgcggagaagagctccaagcacggggcggaggaccggacacagaacatcatcatggtgctcaaggaccgcatgaagatccgggagcgcaacaagcccgagatcttcgagctcatccaggagatcttcgcggtgaccaagacggcgcacacgcagcagatgaaggcggtcaagcagagcgtgctggacggcacgtccaagtggtccgccaagatcagcatcaccgtggtctgcgcccagggcttgcaggcaaaggacaagacaggatccagtgacccctatgtcaccgtccaggtcgggaagaccaagaaacggacaaaaaccatctatgggaacctcaacccggtgtgggaggagaatttccactttgaatgtcacaattcctccgaccgcatcaaggtgcgcgtctgggacgaggatgacgacatcaaatcccgcgtgaaacagaggttcaagagggaatctgacgatttcctggggcagacgatcattgaggtgcggacgctcagcggcgagatggacgtgtggtacaacctggacaagcgaactgacaaatctgccgtgtcgggtgccatccggctccacatcagtgtggagatcaaaggcgaggagaaggtggccccgtaccatgtccagtacacctgtctgcatgagaacctgttccacttcgtgaccgacgtgcagaacaatggggtcgtgaagatcccagatgccaagggtgacgatgcctggaaggtttactacgatgagacagcccaggagattgtggacgagtttgccatgcgctacggcgtcgagtccatctaccaagccatgacccactttgcctgcctctcctccaagtatatgtgcccaggggtgcctgccgtcatgagcaccctgctcgccaacatcaatgcctactacgcacacaccaccgcctccaccaacgtgtctgcctccgaccgcttcgccgcctccaactttgggaaagagcgcttcgtgaaactcctggaccagctgcataactccctgcggattgacctctccatgtaccggaataacttcccagccagcagcccggagagactccaggacctcaaatccactgtggaccttctcaccagcatcaccttctttcggatgaaggtacaagaactccagagcccgccccgagccagccaggtggtaaaggactgtgtgaaagcctgccttaattctacctacgagtacatcttcaataactgccatgaactgtacagccgggagtaccagacagacccggccaagaagggggaagttctcccagaggaacaggggcccagcatcaagaacctcgacttctggtccaagctgattaccctcatagtgtccatcattgaggaagacaagaattcctacactccctgcctcaaccagtttccccaggagctgaatgtgggtaaaatcagcgctgaagtgatgtggaatctgtttgcccaagacatgaagtacgccatggaggagcacgacaagcatcgtctatgcaagagtgccgactacatgaacctccacttcaaggtgaaatggctctacaatgagtatgtgacggaacttcccgccttcaaggaccgcgtgcctgagtaccctgcatggtttgaacccttcgtcatccagtggctggatgagaatgaggaggtgtcccgggatttcctgcacggtgccctggagcgagacaagaaggatgggttccagcagacctcagagcatgccctattctcctgctccgtggtggatgttttctcccaactcaaccagagctttgaaatcatcaagaaactcgagtgtcccgaccctcagatcgtggggcactacatgaggcgctttgccaagaccatcagtaatgtgctcctccagtatgcagacatcatctccaaggactttgcctcctactgctccaaggagaaggagaaaccctgcattctcatgaataacactcaacagctacgagttcagctggagaagatgttcgaagccatgggaggaaaggagctggatgctgaagccagtgacatcctgaaggagcttcaggtgaaactcaataacgtcttggatgagctcagccgggtgtttgctaccagcttccagccgcacattgaagagtgtgtcaaacagatgggtgacatccttagccaggttaagggcacaggcaatgtgccagccagtgcctgcagcagcgtggcccaggacgcggacaatgtgttgcagcccatcatggacctgctggacagcaacctgaccctctttgccaaaatctgtgagaagactgtgctgaagcgagtgctgaaggagctgtggaagctggttatgaacaccatggagaaaaccatcgtcctgccgcccctcactgaccagacggggaacctcttgagaaaacatggcaagggattagaaaagggcagggtgaaattgccaagccactcagacggaacccagatgatcttcaatgcagccaaggagctgggtcagctgtccaaactcaaggatcacatggtacgagaagaagccaagagcttgaccccaaagcagtgcgcggttgttgagttggccctggacaccatcaagcaatatttccacgcgggtggcgtgggcctcaagaagaccttcctggagaagagcccggacctgcaatccttgcgctatgccctgtcgctctacacgcaggccaccgacctgctaatcaagacctttgtacagacgcaatcggcccagggcttgggtgtagaagaccctgtgggtgaagtctctgtccatgttgagctgttcactcatccaggaactggggaacacaaggtcacagtgaaagtggtggctgccaatgacctcaagtggcagacttctggcatcttccggccgttcatcgaggtcaacatcattgggccccagctcagcgacaagaaacgcaagtttgcgaccaaatccaagaacaatagctgggctcccaagtacaatgagagcttccagttcacgctgagcgccgacgcgggtcccgagtgctatgagctgcaggtgtgcgtcaaggactactgcttcgcgcgcgaggaccgcacggtggggctggccgtgctgcagctgcgtgagctggcccagcgcgggagcgccgcctgctggctgccgctcggccgccgcatccacatggacgacacgggcctcacggtgctgcgaatcctctcgcagcgcagcaacgacgaggtggccaaggagttcgtgaagctcaagtcggacacgcgctccgccgaggagggcggtgccgcgcctgcgccttagcgcgggcggtcggccgagcggcactgcgcctgcgcggagggcgctgggcggggagggacggggcttgcgccttggtgggacctccccaggggcggggctcggggggctccacgccaagggtgggctgcgcctacgcccttgactcagctttcccttttggggaattaggaatggaggatgccccgccctctcgggaggccacgcccaagggcgcgacgaaggaaggagccacatccccaacttgaggccacgcccccagcacctagggggcattttgagctgggatgggggaaacctcgtccctatggaggaggccacatcccggggctctggtaccgggaggcaccacctcatgtcccctggaaaagccataagatgggacccagacccctgggaccccagaccaattgccaagtatggaaatctcagctccctcgagggggggccctgggcaaggggtagggctctctggagcgcccctctaggtggcctggggactggagggaccaggatgctggttggagggccccggaataccggagtccctttagatatttgtgcaaaaaataaatggggggaggggggaggatgggatttcaaaagcacatgcgcccttgggcgcccaaaccctgggggccgaggggacggctctggttccccacgctgcccctacttccctttgggagtttgcctctccctctcccccaacaaacccagtcctcatatcatagagttcaacacacccatttgacagatggcaaaactgaggcttaaagagctgcttgagacttggccaaggttccaggtgccataccctctgtgcccctcccttaggcctgtgtgccccatggaagggtgggctgagatcgggatgacctgacacagctccctattgctgctaattccccctcggcctcctccaaggggtgggaattccaggccaagacccctacttcgcctttccttctccggctgccaagcaggacctttgccctcagccctttctcctgggatctccatgggggatgccatgagggcctcccaccacaaaagagaatttgggatcccctggtcccaggtttctccatcccttcttccttttccagaattttccaaataggaaagaacagaaggagaccagaaactctaggggggagaaagagaatgagagaaagagaatgagagagagagaaacacaaacacagtgacacagtgagagcttagtctccaagagcctattcattgattcaaacacccaagccacaggatacctcagatggccctcttgccagctggaagctctttctccaatgagcaaagttacagtgacctggctggagttacctggtgcacataggaccttaggggaaagttcagcgtggactacacttgctctgggatctgcttttccacatgtgtgtatggcacgcctttttctgctggattgggaaggacaagattttgctgtgctagggagaaatgaaaacggggtgagctgagtagctgggtttctggaggatagaacatcagatggggaggctttccgaggtgaagaatgagagggaaccacttactagagagaaaagagctccaggcctggggaacagcacgtgcgaaggccaggagagaagaactgttgaaacaacgagaagggtggcacggctggagctgagccagcaagggggatcgtgaggagccttggggttggggagatctgcagaagcatcagaccaggcagggcctcgtacgcagtcctgaggagttttacttttattctaagacagttggggagctccaggagctgttttaagttggggagagactggattccagcctgcaaaagctgttttgtgaagactaaaaccagtgaggagaggtggaggtgctttggggacactgaaatggattcttggaaagattctgaaggctgtgttgaaaagacacctatagctgtggggacatgactataatcccagcatttggggagaccgaggctggcagatcacttaaggtcaggagtttgagaccagcctggccaacatggcgaaaccccatctctgctaaaaatacaaaaattagctgggtgcagtggtgcatgcctgtagtcccagctactcaggagactgaggcgggagaattgtttgaaccctggaggcagaggttgtagtgagtcgtgatcacacaactgcactccagcctgggcaacagaacaatactccattccctcccctctaccccaccaaaaaaaaaaaaaaatcctgcccttagatgagctctagggctgctgagtacagttgtcccagttgcacagtgcccaagggtttggcattgctaagaaggccacgtgcaaatcctagatattgagtgttgtatgtttgtgacgttggtttcccgacatgtgaatggcccaagtgtctggaagaagtggcgccactttctaatttgcttggagatgttgcatgtcccttaaattcagacaggtgcaggtaactggaggttctgaaccaaaggttaaaatgcaaattctcatacagggttgggaagttgtagccagggataagcttatgtgactgttatatggactgaggagcagatgtgaatttcgaaccatgacatggctgagggtaggggtcgggtggatggatgattcagggttgtaacccatagagcccaaaggggaagtgatctgtgacctggggtgagggtgatctggaagatttttggatggctggaaagaaatggggaagtcgagctgcctgagagagccaagttatttcccaaaagattccttaggagtctttctgttcaagacctccgtgtgtgtgtgtgtgtgtttagggttccccagcaatggcccaggcatgtgaaggaaacaagcttcttcagggaatatttgttgaatgagttttcctgactcccaggctagaactgtttttgcaatttccaccctcttttctttcccccagagaactcctattcgtccttcaaaacccatcacggaaacccctcttggagaaaaccctccttccttcccctcaggactttcccagccaccgtctctcctccagtccagcctgatgccatgggactgggggtttctctgtccagctctgtttctcccagactggggtctgaggactctcaggacccccaactttacctagcacaggctgggcacaagtgggtgacagggagtctacgcctagtggaattatgtattggggcagggtcagtgtgagaatacacatccgcatgcatgtctgtccatgtctgtccgtaccaaccttccccttccacacggacctgggcacataggaggtgtctgagcctgacacatgggacagagagtggacatggctgagacacggacagagaaaagacaaggagtccagggggctgaaagccttttgaaatcaggaagttcctgtattggcagaacaaagcccagagaggagcagggctttcctcaacgccacccagcaagtggacacagagcccggccttggatgacacctccagggttctgaaccctggacctcgctttatgcaaggagctggccccacatttccatgaatcggggaaacagcacaagaaggttggcctgtggcagggcaagggttaaaggggtgacattgagggatgcctcagagtcaaagtcccctgaccaagaggaatagagtagaaaacacagagacagagggtgagatcacgccccgatgaggacggagagagacagagatggagagagacatagaggtggaaatatacagagaaagataaatgcagagaccaaggcagggagtgtcgggggaagtaaagagggtgtcctgaagaaagaaggatctgttcactcttaccagtctgtcctcgaatgatttgcataaaatgaggaggtgcctgtccacacccccaattcctctctcaggccccagagcctgagacctcaccatgcccccatcagagatgcaaaaaactaaacacccaactagaaatccttgggacctctctcggctgggatctcagagcctttctgtcccctacccctaccccatgtgctgtcgattttgcagatggggacaacctggggcctcccggaactctgccaccctggggaagttgggggagggccttagtcccggatcacaaccccgtctgctccccagaatcctttcctaagaatcgttgaggaccaaagttgtctttgctgacacgtgttgcttttctctttgccttttattgtttcagagaaaaatcaagttgactgtgtcaagtaacaccccaccccttacccccgtccagccatagtggctctctggagacacaggtcacaggcggagggtcccctgatcatccccaaccacacagccagggggacttgacccctgtccacccctgtctcgtgctccctcagacccccacaaaccggccaagcagtccggggaggcttcccctccacacaactcttagcatgtgattgcagatgtgaaatcaaaacgttgtttgttttttgttttgttttgattctaccccgtcggtccagtgtctgcacagacgccttcatttctctgtaaatatgtgacttggaacaaatgtttaacacaaacgagaagtggtcatgaatgcatggtgttgagatgttttgcactattctgactttttggtctctgtaaaaatattttattaacagcagacattaaaaaaagaaaaaccacacaca

SEQ ID NO: 4 - RNA, 9904 nt, Homo sapiens
  source 1..9904: mol_type = mRNA
gcccccggtgctgaaccaagatggccggtggcggccgggccccggcgtgagccaagcgcgggctgcagccgggagatgccccagcccagcggccgctgagcccgacccgacagagccggcccggccgcctccggcccacctgcgagctcggagacatgtctctgctttgcgttggagtcaaaaaagccaagtttgatggtgcccaagagaaattcaacacgtacgtgaccctgaaagtgcagaatgtcaagagcacgaccatcgcggtgcggggcagccagcccagctgggagcaggatttcatgttcgagattaaccgtctggatttgggactgacggtggaggtgtggaataagggtctcatctgggacacaatggtgggcactgtgtggatcccactgaggaccatccgccagtccaatgaggagggccctggagagtggctgacgctggactcccaggtcatcatggcagacagtgagatctgtggcaccaaggaccccaccttccaccgcatcctcctggacacgcgctttgagctacccttagacattcctgaagaggaggctcgctactgggccaagaagctggagcagctcaatgctatgcgggaccaggatgaatattcgttccaagatgagcaagacaagcctctgcctgtccccagcaaccagtgctgcaactggaattattttggctggggtgagcagcacaacgatgaccccgacagtgcagtggatgatcgtgacagtgactaccgcagtgaaacgagcaacagcatcccgccgccctattatactacgtcacaacccaacgcctcagtccaccaatattctgttcgcccaccacccctgggctcccgggagtcctacagtgactccatgcacagttacgaggagttctctgagccacaagccctcagccccacgggtagcagccgctatgcctcttccggggagctgagccagggaagctctcagctgagcgaggacttcgaccctgacgagcacagcctgcagggctccgacatggaggatgagcgggaccgggactcctaccactcctgccacagctcggtcagctaccacaaagactcgcctcgctgggaccaggatgaggaagagctggaggaggacctggaggacttcctggaggaggaggagctgcctgaagatgaggaggagctggaggaggaggaggaggaggtgcctgacgatttgggcagctatgcccagcgtgaagacgtagctgtggctgagcccaaagacttcaaacgcatcagcctcccgccagctgccccagggaaggaggacaaggccccagtggcacccaccgaggcccccgacatggccaaggtggcccccaagccagccacgcccgacaaggtgcctgcagctgagcagatccctgaggctgagccacccaaggacgaggagagtttcaggccgagagaggatgaggaaggccaggaggggcaggactccatgtccagggccaaggccaactggctgcgtgccttcaacaaggtgcggatgcagctgcaggaggcccggggagaaggagagatgtctaaatccctatggttcaaaggcggcccagggggcggtctcatcatcatcgacagcatgccagacatccgcaagaggaaacctatcccactcgtgagcgacttgtccctggtccagtccaggaaagcgggcatcacctcggccttggcctccagcacgttgaacaacgaggagctgaaaaaccacgtttacaagaagaccctgcaagccttaatctaccccatctcgtgcacgacgccacacaacttcgaagtgtggacggccaccacgcccacctactgctacgagtgcgaggggctgctgtggggcatcgcgaggcagggcatgcgctgcaccgagtgcggtgtcaagtgccacgagaagtgccaggacctgctcaacgccgactgcctgcagcgggctgcggagaagagctccaagcacggggcggaggaccggacacagaacatcatcatggtgctcaaggaccgcatgaagatccgggagcgcaacaagcccgagatcttcgagctcatccaggagatcttcgcggtgaccaagacggcgcacacgcagcagatgaaggcggtcaagcagagcgtgctggacggcacgtccaagtggtccgccaagatcagcatcaccgtggtctgcgcccagggcttgcaggcaaaggacaagacaggatccagtgacccctatgtcaccgtccaggtcgggaagaccaagaaacggacaaaaaccatctatgggaacctcaacccggtgtgggaggagaatttccactttgaatgtcacaattcctccgaccgcatcaaggtgcgcgtctgggacgaggatgacgacatcaaatcccgcgtgaaacagaggttcaagagggaatctgacgatttcctggggcagacgatcattgaggtgcggacgctcagcggcgagatggacgtgtggtacaacctggacaagcgaactgacaaatctgccgtgtcgggtgccatccggctccacatcagtgtggagatcaaaggcgaggagaaggtggccccgtaccatgtccagtacacctgtctgcatgagaacctgttccacttcgtgaccgacgtgcagaacaatggggtcgtgaagatcccagatgccaagggtgacgatgcctggaaggtttactacgatgagacagcccaggagattgtggacgagtttgccatgcgctacggcgtcgagtccatctaccaagccatgacccactttgcctgcctctcctccaagtatatgtgcccaggggtgcctgccgtcatgagcaccctgctcgccaacatcaatgcctactacgcacacaccaccgcctccaccaacgtgtctgcctccgaccgcttcgccgcctccaactttgggaaagagcgcttcgtgaaactcctggaccagctgcataactccctgcggattgacctctccatgtaccggaataacttcccagccagcagcccggagagactccaggacctcaaatccactgtggaccttctcaccagcatcaccttctttcggatgaaggtacaagaactccagagcccgccccgagccagccaggtggtaaaggactgtgtgaaagcctgccttaattctacctacgagtacatcttcaataactgccatgaactgtacagccgggagtaccagacagacccggccaagaagggggaagttctcccagaggaacaggggcccagcatcaagaacctcgacttctggtccaagctgattaccctcatagtgtccatcattgaggaagacaagaattcctacactccctgcctcaaccagtttccccaggagctgaatgtgggtaaaatcagcgctgaagtgatgtggaatctgtttgcccaagacatgaagtacgccatggaggagcacgacaagcatcgtctatgcaagagtgccgactacatgaacctccacttcaaggtgaaatggctctacaatgagtatgtgacggaacttcccgccttcaaggaccgcgtgcctgagtaccctgcatggtttgaacccttcgtcatccagtggctggatgagaatgaggaggtgtcccgggatttcctgcacggtgccctggagcgagacaagaaggatgggttccagcagacctcagagcatgccctattctcctgctccgtggtggatgttttctcccaactcaaccagagctttgaaatcatcaagaaactcgagtgtcccgaccctcagatcgtggggcactacatgaggcgctttgccaagaccatcagtaatgtgctcctccagtatgcagacatcatctccaaggactttgcctcctactgctccaaggagaaggagaaagtgccctgcattctcatgaataacactcaacagctacgagttcagctggagaagatgttcgaagccatgggaggaaaggagctggatgctgaagccagtgacatcctgaaggagcttcaggtgaaactcaataacgtcttggatgagctcagccgggtgtttgctaccagcttccagccgcacattgaagagtgtgtcaaacagatgggtgacatccttagccaggttaagggcacaggcaatgtgccagccagtgcctgcagcagcgtggcccaggacgcggacaatgtgttgcagcccatcatggacctgctggacagcaacctgaccctctttgccaaaatctgtgagaagactgtgctgaagcgagtgctgaaggagctgtggaagctggttatgaacaccatggagaaaaccatcgtcctgccgcccctcactgaccagacgggaacccagatgatcttcaatgcagccaaggagctgggtcagctgtccaaactcaaggatcacatggtacgagaagaagccaagagcttgaccccaaagcagtgcgcggttgttgagttggccctggacaccatcaagcaatatttccacgcgggtggcgtgggcctcaagaagaccttcctggagaagagcccggacctgcaatccttgcgctatgccctgtcgctctacacgcaggccaccgacctgctaatcaagacctttgtacagacgcaatcggcccagggcttgggtgtagaagaccctgtgggtgaagtctctgtccatgttgagctgttcactcatccaggaactggggaacacaaggtcacagtgaaagtggtggctgccaatgacctcaagtggcagacttctggcatcttccggccgttcatcgaggtcaacatcattgggccccagctcagcgacaagaaacgcaagtttgcgaccaaatccaagaacaatagctgggctcccaagtacaatgagagcttccagttcacgctgagcgccgacgcgggtcccgagtgctatgagctgcaggtgtgcgtcaaggactactgcttcgcgcgcgaggaccgcacggtggggctggccgtgctgcagctgcgtgagctggcccagcgcgggagcgccgcctgctggctgccgctcggccgccgcatccacatggacgacacgggcctcacggtgctgcgaatcctctcgcagcgcagcaacgacgaggtggccaaggagttcgtgaagctcaagtcggacacgcgctccgccgaggagggcggtgccgcgcctgcgccttagcgcgggcggtcggccgagcggcactgcgcctgcgcggagggcgctgggcggggagggacggggcttgcgccttggtgggacctccccaggggcggggctcggggggctccacgccaagggtgggctgcgcctacgcccttgactcagctttcccttttggggaattaggaatggaggatgccccgccctctcgggaggccacgcccaagggcgcgacgaaggaaggagccacatccccaacttgaggccacgcccccagcacctagggggcattttgagctgggatgggggaaacctcgtccctatggaggaggccacatcccggggctctggtaccgggaggcaccacctcatgtcccctggaaaagccataagatgggacccagacccctgggaccccagaccaattgccaagtatggaaatctcagctccctcgagggggggccctgggcaaggggtagggctctctggagcgcccctctaggtggcctggggactggagggaccaggatgctggttggagggccccggaataccggagtccctttagatatttgtgcaaaaaataaatggggggaggggggaggatgggatttcaaaagcacatgcgcccttgggcgcccaaaccctgggggccgaggggacggctctggttccccacgctgcccctacttccctttgggagtttgcctctccctctcccccaacaaacccagtcctcatatcatagagttcaacacacccatttgacagatggcaaaactgaggcttaaagagctgcttgagacttggccaaggttccaggtgccataccctctgtgcccctcccttaggcctgtgtgccccatggaagggtgggctgagatcgggatgacctgacacagctccctattgctgctaattccccctcggcctcctccaaggggtgggaattccaggccaagacccctacttcgcctttccttctccggctgccaagcaggacctttgccctcagccctttctcctgggatctccatgggggatgccatgagggcctcccaccacaaaagagaatttgggatcccctggtcccaggtttctccatcccttcttccttttccagaattttccaaataggaaagaacagaaggagaccagaaactctaggggggagaaagagaatgagagaaagagaatgagagagagagaaacacaaacacagtgacacagtgagagcttagtctccaagagcctattcattgattcaaacacccaagccacaggatacctcagatggccctcttgccagctggaagctctttctccaatgagcaaagttacagtgacctggctggagttacctggtgcacataggaccttaggggaaagttcagcgtggactacacttgctctgggatctgcttttccacatgtgtgtatggcacgcctttttctgctggattgggaaggacaagattttgctgtgctagggagaaatgaaaacggggtgagctgagtagctgggtttctggaggatagaacatcagatggggaggctttccgaggtgaagaatgagagggaaccacttactagagagaaaagagctccaggcctggggaacagcacgtgcgaaggccaggagagaagaactgttgaaacaacgagaagggtggcacggctggagctgagccagcaagggggatcgtgaggagccttggggttggggagatctgcagaagcatcagaccaggcagggcctcgtacgcagtcctgaggagttttacttttattctaagacagttggggagctccaggagctgttttaagttggggagagactggattccagcctgcaaaagctgttttgtgaagactaaaaccagtgaggagaggtggaggtgctttggggacactgaaatggattcttggaaagattctgaaggctgtgttgaaaagacacctatagctgtggggacatgactataatcccagcatttggggagaccgaggctggcagatcacttaaggtcaggagtttgagaccagcctggccaacatggcgaaaccccatctctgctaaaaatacaaaaattagctgggtgcagtggtgcatgcctgtagtcccagctactcaggagactgaggcgggagaattgtttgaaccctggaggcagaggttgtagtgagtcgtgatcacacaactgcactccagcctgggcaacagaacaatactccattccctcccctctaccccaccaaaaaaaaaaaaaaatcctgcccttagatgagctctagggctgctgagtacagttgtcccagttgcacagtgcccaagggtttggcattgctaagaaggccacgtgcaaatcctagatattgagtgttgtatgtttgtgacgttggtttcccgacatgtgaatggcccaagtgtctggaagaagtggcgccactttctaatttgcttggagatgttgcatgtcccttaaattcagacaggtgcaggtaactggaggttctgaaccaaaggttaaaatgcaaattctcatacagggttgggaagttgtagccagggataagcttatgtgactgttatatggactgaggagcagatgtgaatttcgaaccatgacatggctgagggtaggggtcgggtggatggatgattcagggttgtaacccatagagcccaaaggggaagtgatctgtgacctggggtgagggtgatctggaagatttttggatggctggaaagaaatggggaagtcgagctgcctgagagagccaagttatttcccaaaagattccttaggagtctttctgttcaagacctccgtgtgtgtgtgtgtgtgtttagggttccccagcaatggcccaggcatgtgaaggaaacaagcttcttcagggaatatttgttgaatgagttttcctgactcccaggctagaactgtttttgcaatttccaccctcttttctttcccccagagaactcctattcgtccttcaaaacccatcacggaaacccctcttggagaaaaccctccttccttcccctcaggactttcccagccaccgtctctcctccagtccagcctgatgccatgggactgggggtttctctgtccagctctgtttctcccagactggggtctgaggactctcaggacccccaactttacctagcacaggctgggcacaagtgggtgacagggagtctacgcctagtggaattatgtattggggcagggtcagtgtgagaatacacatccgcatgcatgtctgtccatgtctgtccgtaccaaccttccccttccacacggacctgggcacataggaggtgtctgagcctgacacatgggacagagagtggacatggctgagacacggacagagaaaagacaaggagtccagggggctgaaagccttttgaaatcaggaagttcctgtattggcagaacaaagcccagagaggagcagggctttcctcaacgccacccagcaagtggacacagagcccggccttggatgacacctccagggttctgaaccctggacctcgctttatgcaaggagctggccccacatttccatgaatcggggaaacagcacaagaaggttggcctgtggcagggcaagggttaaaggggtgacattgagggatgcctcagagtcaaagtcccctgaccaagaggaatagagtagaaaacacagagacagagggtgagatcacgccccgatgaggacggagagagacagagatggagagagacatagaggtggaaatatacagagaaagataaatgcagagaccaaggcagggagtgtcgggggaagtaaagagggtgtcctgaagaaagaaggatctgttcactcttaccagtctgtcctcgaatgatttgcataaaatgaggaggtgcctgtccacacccccaattcctctctcaggccccagagcctgagacctcaccatgcccccatcagagatgcaaaaaactaaacacccaactagaaatccttgggacctctctcggctgggatctcagagcctttctgtcccctacccctaccccatgtgctgtcgattttgcagatggggacaacctggggcctcccggaactctgccaccctggggaagttgggggagggccttagtcccggatcacaaccccgtctgctccccagaatcctttcctaagaatcgttgaggaccaaagttgtctttgctgacacgtgttgcttttctctttgccttttattgtttcagagaaaaatcaagttgactgtgtcaagtaacaccccaccccttacccccgtccagccatagtggctctctggagacacaggtcacaggcggagggtcccctgatcatccccaaccacacagccagggggacttgacccctgtccacccctgtctcgtgctccctcagacccccacaaaccggccaagcagtccggggaggcttcccctccacacaactcttagcatgtgattgcagatgtgaaatcaaaacgttgtttgttttttgttttgttttgattctaccccgtcggtccagtgtctgcacagacgccttcatttctctgtaaatatgtgacttggaacaaatgtttaacacaaacgagaagtggtcatgaatgcatggtgttgagatgttttgcactattctgactttttggtctctgtaaaaatattttattaacagcagacattaaaaaaagaaaaaccacacaca

SEQ ID NO: 5 - RNA, 9953 nt, Homo sapiens
  source 1..9953: mol_type = mRNA
ctgaaccaagatggccggtggcggccgggccccggcgtgagccaagcgcgggctgcagccgggagatgccccagcccagcggccgctgagcccgacccgacagagccggcccggccgcctccggcccacctgcgagctcggagacatgtctctgctttgcgttggagagaaattcaacacgtacgtgaccctgaaagtgcagaatgtcaagagcacgaccatcgcggtgcggggcagccagcccagctgggagcaggatttcatgttcgagattaaccgtctggatttgggactgacggtggaggtgtggaataagggtctcatctgggacacaatggtgggcactgtgtggatcccactgaggaccatccgccagtccaatgaggagggccctggagagtggctgacgctggactcccaggtcatcatggcagacagtgagatctgtggcaccaaggaccccaccttccaccgcatcctcctggacacgcgctttgagctacccttagacattcctgaagaggaggctcgctactgggccaagaagctggagcagctcaatgctatgcgggaccaggatgaatattcgttccaagatgagcaagacaagcctctgcctgtccccagcaaccagtgctgcaactggaattattttggctggggtgagcagcacaacgatgaccccgacagtgcagtggatgatcgtgacagtgactaccgcagtgaaacgagcaacagcatcccgccgccctattatactacgtcacaacccaacgcctcagtccaccaatattctgttcgcccaccacccctgggctcccgggagtcctacagtgactccatgcacagttacgaggagttctctgagccacaagccctcagccccacgggtagcagccgctatgcctcttccggggagctgagccagggaagctctcagctgagcgaggacttcgaccctgacgagcacagcctgcagggctccgacatggaggatgagcgggaccgggactcctaccactcctgccacagctcggtcagctaccacaaagactcgcctcgctgggaccaggatgaggaagagctggaggaggacctggaggacttcctggaggaggaggagctgcctgaagatgaggaggagctggaggaggaggaggaggaggtgcctgacgatttgggcagctatgcccagcgtgaagacgtagctgtggctgagcccaaagacttcaaacgcatcagcctcccgccagctgccccagggaaggaggacaaggccccagtggcacccaccgaggcccccgacatggccaaggtggcccccaagccagccacgcccgacaaggtgcctgcagctgagcagatccctgaggctgagccacccaaggacgaggagagtttcaggccgagagaggatgaggaaggccaggaggggcaggactccatgtccagggccaaggccaactggctgcgtgccttcaacaaggtgcggatgcagctgcaggaggcccggggagaaggagagatgtctaaatccctatggttcaaaggcggcccagggggcggtctcatcatcatcgacagcatgccagacatccgcaagaggaaacctatcccactcgtgagcgacttggccatgtccctggtccagtccaggaaagcgggcatcacctcggccttggcctccagcacgttgaacaacgaggagctgaaaaaccacgtttacaagaagaccctgcaagccttaatctaccccatctcgtgcacgacgccacacaacttcgaagtgtggacggccaccacgcccacctactgctacgagtgcgaggggctgctgtggggcatcgcgaggcagggcatgcgctgcaccgagtgcggtgtcaagtgccacgagaagtgccaggacctgctcaacgccgactgcctgcagcgggctgcggagaagagctccaagcacggggcggaggaccggacacagaacatcatcatggtgctcaaggaccgcatgaagatccgggagcgcaacaagcccgagatcttcgagctcatccaggagatcttcgcggtgaccaagacggcgcacacgcagcagatgaaggcggtcaagcagagcgtgctggacggcacgtccaagtggtccgccaagatcagcatcaccgtggtctgcgcccagggcttgcaggcaaaggacaagacaggatccagtgacccctatgtcaccgtccaggtcgggaagaccaagaaacggacaaaaaccatctatgggaacctcaacccggtgtgggaggagaatttccactttgaatgtcacaattcctccgaccgcatcaaggtgcgcgtctgggacgaggatgacgacatcaaatcccgcgtgaaacagaggttcaagagggaatctgacgatttcctggggcagacgatcattgaggtgcggacgctcagcggcgagatggacgtgtggtacaacctggacaagcgaactgacaaatctgccgtgtcgggtgccatccggctccacatcagtgtggagatcaaaggcgaggagaaggtggccccgtaccatgtccagtacacctgtctgcatgagaacctgttccacttcgtgaccgacgtgcagaacaatggggtcgtgaagatcccagatgccaagggtgacgatgcctggaaggtttactacgatgagacagcccaggagattgtggacgagtttgccatgcgctacggcgtcgagtccatctaccaagccatgacccactttgcctgcctctcctccaagtatatgtgcccaggggtgcctgccgtcatgagcaccctgctcgccaacatcaatgcctactacgcacacaccaccgcctccaccaacgtgtctgcctccgaccgcttcgccgcctccaactttgggaaagagcgcttcgtgaaactcctggaccagctgcataactccctgcggattgacctctccatgtaccggaataacttcccagccagcagcccggagagactccaggacctcaaatccactgtggaccttctcaccagcatcaccttctttcggatgaaggtacaagaactccagagcccgccccgagccagccaggtggtaaaggactgtgtgaaagcctgccttaattctacctacgagtacatcttcaataactgccatgaactgtacagccgggagtaccagacagacccggccaagaagggggaagttctcccagaggaacaggggcccagcatcaagaacctcgacttctggtccaagctgattaccctcatagtgtccatcattgaggaagacaagaattcctacactccctgcctcaaccagtttccccaggagctgaatgtgggtaaaatcagcgctgaagtgatgtggaatctgtttgcccaagacatgaagtacgccatggaggagcacgacaagcatcgtctatgcaagagtgccgactacatgaacctccacttcaaggtgaaatggctctacaatgagtatgtgacggaacttcccgccttcaaggaccgcgtgcctgagtaccctgcatggtttgaacccttcgtcatccagtggctggatgagaatgaggaggtgtcccgggatttcctgcacggtgccctggagcgagacaagaaggatgggttccagcagacctcagagcatgccctattctcctgctccgtggtggatgttttctcccaactcaaccagagctttgaaatcatcaagaaactcgagtgtcccgaccctcagatcgtggggcactacatgaggcgctttgccaagaccatcagtaatgtgctcctccagtatgcagacatcatctccaaggactttgcctcctactgctccaaggagaaggagaaagtgccctgcattctcatgaataacactcaacagctacgagttcagctggagaagatgttcgaagccatgggaggaaaggagctggatgctgaagccagtgacatcctgaaggagcttcaggtgaaactcaataacgtcttggatgagctcagccgggtgtttgctaccagcttccagccgcacattgaagagtgtgtcaaacagatgggtgacatccttagccaggttaagggcacaggcaatgtgccagccagtgcctgcagcagcgtggcccaggacgcggacaatgtgttgcagcccatcatggacctgctggacagcaacctgaccctctttgccaaaatctgtgagaagactgtgctgaagcgagtgctgaaggagctgtggaagctggttatgaacaccatggagaaaaccatcgtcctgccgcccctcactgaccagacgatgatcgggaacctcttgagaaaacatggcaagggattagaaaagggcagggtgaaattgccaagccactcagacggaacccagatgatcttcaatgcagccaaggagctgggtcagctgtccaaactcaaggatcacatggtacgagaagaagccaagagcttgaccccaaagcagtgcgcggttgttgagttggccctggacaccatcaagcaatatttccacgcgggtggcgtgggcctcaagaagaccttcctggagaagagcccggacctgcaatccttgcgctatgccctgtcgctctacacgcaggccaccgacctgctaatcaagacctttgtacagacgcaatcggcccagggcttgggtgtagaagaccctgtgggtgaagtctctgtccatgttgagctgttcactcatccaggaactggggaacacaaggtcacagtgaaagtggtggctgccaatgacctcaagtggcagacttctggcatcttccggccgttcatcgaggtcaacatcattgggccccagctcagcgacaagaaacgcaagtttgcgaccaaatccaagaacaatagctgggctcccaagtacaatgagagcttccagttcacgctgagcgccgacgcgggtcccgagtgctatgagctgcaggtgtgcgtcaaggactactgcttcgcgcgcgaggaccgcacggtggggctggccgtgctgcagctgcgtgagctggcccagcgcgggagcgccgcctgctggctgccgctcggccgccgcatccacatggacgacacgggcctcacggtgctgcgaatcctctcgcagcgcagcaacgacgaggtggccaaggagttcgtgaagctcaagtcggacacgcgctccgccgaggagggcggtgccgcgcctgcgccttagcgcgggcggtcggccgagcggcactgcgcctgcgcggagggcgctgggcggggagggacggggcttgcgccttggtgggacctccccaggggcggggctcggggggctccacgccaagggtgggctgcgcctacgcccttgactcagctttcccttttggggaattaggaatggaggatgccccgccctctcgggaggccacgcccaagggcgcgacgaaggaaggagccacatccccaacttgaggccacgcccccagcacctagggggcattttgagctgggatgggggaaacctcgtccctatggaggaggccacatcccggggctctggtaccgggaggcaccacctcatgtcccctggaaaagccataagatgggacccagacccctgggaccccagaccaattgccaagtatggaaatctcagctccctcgagggggggccctgggcaaggggtagggctctctggagcgcccctctaggtggcctggggactggagggaccaggatgctggttggagggccccggaataccggagtccctttagatatttgtgcaaaaaataaatggggggaggggggaggatgggatttcaaaagcacatgcgcccttgggcgcccaaaccctgggggccgaggggacggctctggttccccacgctgcccctacttccctttgggagtttgcctctccctctcccccaacaaacccagtcctcatatcatagagttcaacacacccatttgacagatggcaaaactgaggcttaaagagctgcttgagacttggccaaggttccaggtgccataccctctgtgcccctcccttaggcctgtgtgccccatggaagggtgggctgagatcgggatgacctgacacagctccctattgctgctaattccccctcggcctcctccaaggggtgggaattccaggccaagacccctacttcgcctttccttctccggctgccaagcaggacctttgccctcagccctttctcctgggatctccatgggggatgccatgagggcctcccaccacaaaagagaatttgggatcccctggtcccaggtttctccatcccttcttccttttccagaattttccaaataggaaagaacagaaggagaccagaaactctaggggggagaaagagaatgagagaaagagaatgagagagagagaaacacaaacacagtgacacagtgagagcttagtctccaagagcctattcattgattcaaacacccaagccacaggatacctcagatggccctcttgccagctggaagctctttctccaatgagcaaagttacagtgacctggctggagttacctggtgcacataggaccttaggggaaagttcagcgtggactacacttgctctgggatctgcttttccacatgtgtgtatggcacgcctttttctgctggattgggaaggacaagattttgctgtgctagggagaaatgaaaacggggtgagctgagtagctgggtttctggaggatagaacatcagatggggaggctttccgaggtgaagaatgagagggaaccacttactagagagaaaagagctccaggcctggggaacagcacgtgcgaaggccaggagagaagaactgttgaaacaacgagaagggtggcacggctggagctgagccagcaagggggatcgtgaggagccttggggttggggagatctgcagaagcatcagaccaggcagggcctcgtacgcagtcctgaggagttttacttttattctaagacagttggggagctccaggagctgttttaagttggggagagactggattccagcctgcaaaagctgttttgtgaagactaaaaccagtgaggagaggtggaggtgctttggggacactgaaatggattcttggaaagattctgaaggctgtgttgaaaagacacctatagctgtggggacatgactataatcccagcatttggggagaccgaggctggcagatcacttaaggtcaggagtttgagaccagcctggccaacatggcgaaaccccatctctgctaaaaatacaaaaattagctgggtgcagtggtgcatgcctgtagtcccagctactcaggagactgaggcgggagaattgtttgaaccctggaggcagaggttgtagtgagtcgtgatcacacaactgcactccagcctgggcaacagaacaatactccattccctcccctctaccccaccaaaaaaaaaaaaaaatcctgcccttagatgagctctagggctgctgagtacagttgtcccagttgcacagtgcccaagggtttggcattgctaagaaggccacgtgcaaatcctagatattgagtgttgtatgtttgtgacgttggtttcccgacatgtgaatggcccaagtgtctggaagaagtggcgccactttctaatttgcttggagatgttgcatgtcccttaaattcagacaggtgcaggtaactggaggttctgaaccaaaggttaaaatgcaaattctcatacagggttgggaagttgtagccagggataagcttatgtgactgttatatggactgaggagcagatgtgaatttcgaaccatgacatggctgagggtaggggtcgggtggatggatgattcagggttgtaacccatagagcccaaaggggaagtgatctgtgacctggggtgagggtgatctggaagatttttggatggctggaaagaaatggggaagtcgagctgcctgagagagccaagttatttcccaaaagattccttaggagtctttctgttcaagacctccgtgtgtgtgtgtgtgtgtttagggttccccagcaatggcccaggcatgtgaaggaaacaagcttcttcagggaatatttgttgaatgagttttcctgactcccaggctagaactgtttttgcaatttccaccctcttttctttcccccagagaactcctattcgtccttcaaaacccatcacggaaacccctcttggagaaaaccctccttccttcccctcaggactttcccagccaccgtctctcctccagtccagcctgatgccatgggactgggggtttctctgtccagctctgtttctcccagactggggtctgaggactctcaggacccccaactttacctagcacaggctgggcacaagtgggtgacagggagtctacgcctagtggaattatgtattggggcagggtcagtgtgagaatacacatccgcatgcatgtctgtccatgtctgtccgtaccaaccttccccttccacacggacctgggcacataggaggtgtctgagcctgacacatgggacagagagtggacatggctgagacacggacagagaaaagacaaggagtccagggggctgaaagccttttgaaatcaggaagttcctgtattggcagaacaaagcccagagaggagcagggctttcctcaacgccacccagcaagtggacacagagcccggccttggatgacacctccagggttctgaaccctggacctcgctttatgcaaggagctggccccacatttccatgaatcggggaaacagcacaagaaggttggcctgtggcagggcaagggttaaaggggtgacattgagggatgcctcagagtcaaagtcccctgaccaagaggaatagagtagaaaacacagagacagagggtgagatcacgccccgatgaggacggagagagacagagatggagagagacatagaggtggaaatatacagagaaagataaatgcagagaccaaggcagggagtgtcgggggaagtaaagagggtgtcctgaagaaagaaggatctgttcactcttaccagtctgtcctcgaatgatttgcataaaatgaggaggtgcctgtccacacccccaattcctctctcaggccccagagcctgagacctcaccatgcccccatcagagatgcaaaaaactaaacacccaactagaaatccttgggacctctctcggctgggatctcagagcctttctgtcccctacccctaccccatgtgctgtcgattttgcagatggggacaacctggggcctcccggaactctgccaccctggggaagttgggggagggccttagtcccggatcacaaccccgtctgctccccagaatcctttcctaagaatcgttgaggaccaaagttgtctttgctgacacgtgttgcttttctctttgccttttattgtttcagagaaaaatcaagttgactgtgtcaagtaacaccccaccccttacccccgtccagccatagtggctctctggagacacaggtcacaggcggagggtcccctgatcatccccaaccacacagccagggggacttgacccctgtccacccctgtctcgtgctccctcagacccccacaaaccggccaagcagtccggggaggcttcccctccacacaactcttagcatgtgattgcagatgtgaaatcaaaacgttgtttgttttttgttttgttttgattctaccccgtcggtccagtgtctgcacagacgccttcatttctctgtaaatatgtgacttggaacaaatgtttaacacaaacgagaagtggtcatgaatgcatggtgttgagatgttttgcactattctgactttttggtctctgtaaaaatattttattaacagcagacattaaaaaaagaaaaaccacacacagccttgga

SEQ ID NO: 6 - RNA, 9980 nt, Homo sapiens
  source 1..9980: mol_type = mRNA
ctgaaccaagatggccggtggcggccgggccccggcgtgagccaagcgcgggctgcagccgggagatgccccagcccagcggccgctgagcccgacccgacagagccggcccggccgcctccggcccacctgcgagctcggagacatgtctctgctttgcgttggagtcaaaaaagccaagtttgatggtgcccaagagaaattcaacacgtacgtgaccctgaaagtgcagaatgtcaagagcacgaccatcgcggtgcggggcagccagcccagctgggagcaggatttcatgttcgagattaaccgtctggatttgggactgacggtggaggtgtggaataagggtctcatctgggacacaatggtgggcactgtgtggatcccactgaggaccatccgccagtccaatgaggagggccctggagagtggctgacgctggactcccaggtcatcatggcagacagtgagatctgtggcaccaaggaccccaccttccaccgcatcctcctggacacgcgctttgagctacccttagacattcctgaagaggaggctcgctactgggccaagaagctggagcagctcaatgctatgcgggaccaggatgaatattcgttccaagatgagcaagacaagcctctgcctgtccccagcaaccagtgctgcaactggaattattttggctggggtgagcagcacaacgatgaccccgacagtgcagtggatgatcgtgacagtgactaccgcagtgaaacgagcaacagcatcccgccgccctattatactacgtcacaacccaacgcctcagtccaccaatattctgttcgcccaccacccctgggctcccgggagtcctacagtgactccatgcacagttacgaggagttctctgagccacaagccctcagccccacgggtagcagccgctatgcctcttccggggagctgagccagggaagctctcagctgagcgaggacttcgaccctgacgagcacagcctgcagggctccgacatggaggatgagcgggaccgggactcctaccactcctgccacagctcggtcagctaccacaaagactcgcctcgctgggaccaggatgaggaagagctggaggaggacctggaggacttcctggaggaggaggagctgcctgaagatgaggaggagctggaggaggaggaggaggaggtgcctgacgatttgggcagctatgcccagcgtgaagacgtagctgtggctgagcccaaagacttcaaacgcatcagcctcccgccagctgccccagggaaggaggacaaggccccagtggcacccaccgaggcccccgacatggccaaggtggcccccaagccagccacgcccgacaaggtgcctgcagctgagcagatccctgaggctgagccacccaaggacgaggagagtttcaggccgagagaggatgaggaaggccaggaggggcaggactccatgtccagggccaaggccaactggctgcgtgccttcaacaaggtgcggatgcagctgcaggaggcccggggagaaggagagatgtctaaatccctatggttcaaaggcggcccagggggcggtctcatcatcatcgacagcatgccagacatccgcaagaggaaacctatcccactcgtgagcgacttggccatgtccctggtccagtccaggaaagcgggcatcacctcggccttggcctccagcacgttgaacaacgaggagctgaaaaaccacgtttacaagaagaccctgcaagccttaatctaccccatctcgtgcacgacgccacacaacttcgaagtgtggacggccaccacgcccacctactgctacgagtgcgaggggctgctgtggggcatcgcgaggcagggcatgcgctgcaccgagtgcggtgtcaagtgccacgagaagtgccaggacctgctcaacgccgactgcctgcagcgggctgcggagaagagctccaagcacggggcggaggaccggacacagaacatcatcatggtgctcaaggaccgcatgaagatccgggagcgcaacaagcccgagatcttcgagctcatccaggagatcttcgcggtgaccaagacggcgcacacgcagcagatgaaggcggtcaagcagagcgtgctggacggcacgtccaagtggtccgccaagatcagcatcaccgtggtctgcgcccagggcttgcaggcaaaggacaagacaggatccagtgacccctatgtcaccgtccaggtcgggaagaccaagaaacggacaaaaaccatctatgggaacctcaacccggtgtgggaggagaatttccactttgaatgtcacaattcctccgaccgcatcaaggtgcgcgtctgggacgaggatgacgacatcaaatcccgcgtgaaacagaggttcaagagggaatctgacgatttcctggggcagacgatcattgaggtgcggacgctcagcggcgagatggacgtgtggtacaacctggacaagcgaactgacaaatctgccgtgtcgggtgccatccggctccacatcagtgtggagatcaaaggcgaggagaaggtggccccgtaccatgtccagtacacctgtctgcatgagaacctgttccacttcgtgaccgacgtgcagaacaatggggtcgtgaagatcccagatgccaagggtgacgatgcctggaaggtttactacgatgagacagcccaggagattgtggacgagtttgccatgcgctacggcgtcgagtccatctaccaagccatgacccactttgcctgcctctcctccaagtatatgtgcccaggggtgcctgccgtcatgagcaccctgctcgccaacatcaatgcctactacgcacacaccaccgcctccaccaacgtgtctgcctccgaccgcttcgccgcctccaactttgggaaagagcgcttcgtgaaactcctggaccagctgcataactccctgcggattgacctctccatgtaccggaataacttcccagccagcagcccggagagactccaggacctcaaatccactgtggaccttctcaccagcatcaccttctttcggatgaaggtacaagaactccagagcccgccccgagccagccaggtggtaaaggactgtgtgaaagcctgccttaattctacctacgagtacatcttcaataactgccatgaactgtacagccgggagtaccagacagacccggccaagaagggggaagttctcccagaggaacaggggcccagcatcaagaacctcgacttctggtccaagctgattaccctcatagtgtccatcattgaggaagacaagaattcctacactccctgcctcaaccagtttccccaggagctgaatgtgggtaaaatcagcgctgaagtgatgtggaatctgtttgcccaagacatgaagtacgccatggaggagcacgacaagcatcgtctatgcaagagtgccgactacatgaacctccacttcaaggtgaaatggctctacaatgagtatgtgacggaacttcccgccttcaaggaccgcgtgcctgagtaccctgcatggtttgaacccttcgtcatccagtggctggatgagaatgaggaggtgtcccgggatttcctgcacggtgccctggagcgagacaagaaggatgggttccagcagacctcagagcatgccctattctcctgctccgtggtggatgttttctcccaactcaaccagagctttgaaatcatcaagaaactcgagtgtcccgaccctcagatcgtggggcactacatgaggcgctttgccaagaccatcagtaatgtgctcctccagtatgcagacatcatctccaaggactttgcctcctactgctccaaggagaaggagaaaccctgcattctcatgaataacactcaacagctacgagttcagctggagaagatgttcgaagccatgggaggaaaggagctggatgctgaagccagtgacatcctgaaggagcttcaggtgaaactcaataacgtcttggatgagctcagccgggtgtttgctaccagcttccagccgcacattgaagagtgtgtcaaacagatgggtgacatccttagccaggttaagggcacaggcaatgtgccagccagtgcctgcagcagcgtggcccaggacgcggacaatgtgttgcagcccatcatggacctgctggacagcaacctgaccctctttgccaaaatctgtgagaagactgtgctgaagcgagtgctgaaggagctgtggaagctggttatgaacaccatggagaaaaccatcgtcctgccgcccctcactgaccagacgatgatcgggaacctcttgagaaaacatggcaagggattagaaaagggcagggtgaaattgccaagccactcagacggaacccagatgatcttcaatgcagccaaggagctgggtcagctgtccaaactcaaggatcacatggtacgagaagaagccaagagcttgaccccaaagcagtgcgcggttgttgagttggccctggacaccatcaagcaatatttccacgcgggtggcgtgggcctcaagaagaccttcctggagaagagcccggacctgcaatccttgcgctatgccctgtcgctctacacgcaggccaccgacctgctaatcaagacctttgtacagacgcaatcggcccagggcttgggtgtagaagaccctgtgggtgaagtctctgtccatgttgagctgttcactcatccaggaactggggaacacaaggtcacagtgaaagtggtggctgccaatgacctcaagtggcagacttctggcatcttccggccgttcatcgaggtcaacatcattgggccccagctcagcgacaagaaacgcaagtttgcgaccaaatccaagaacaatagctgggctcccaagtacaatgagagcttccagttcacgctgagcgccgacgcgggtcccgagtgctatgagctgcaggtgtgcgtcaaggactactgcttcgcgcgcgaggaccgcacggtggggctggccgtgctgcagctgcgtgagctggcccagcgcgggagcgccgcctgctggctgccgctcggccgccgcatccacatggacgacacgggcctcacggtgctgcgaatcctctcgcagcgcagcaacgacgaggtggccaaggagttcgtgaagctcaagtcggacacgcgctccgccgaggagggcggtgccgcgcctgcgccttagcgcgggcggtcggccgagcggcactgcgcctgcgcggagggcgctgggcggggagggacggggcttgcgccttggtgggacctccccaggggcggggctcggggggctccacgccaagggtgggctgcgcctacgcccttgactcagctttcccttttggggaattaggaatggaggatgccccgccctctcgggaggccacgcccaagggcgcgacgaaggaaggagccacatccccaacttgaggccacgcccccagcacctagggggcattttgagctgggatgggggaaacctcgtccctatggaggaggccacatcccggggctctggtaccgggaggcaccacctcatgtcccctggaaaagccataagatgggacccagacccctgggaccccagaccaattgccaagtatggaaatctcagctccctcgagggggggccctgggcaaggggtagggctctctggagcgcccctctaggtggcctggggactggagggaccaggatgctggttggagggccccggaataccggagtccctttagatatttgtgcaaaaaataaatggggggaggggggaggatgggatttcaaaagcacatgcgcccttgggcgcccaaaccctgggggccgaggggacggctctggttccccacgctgcccctacttccctttgggagtttgcctctccctctcccccaacaaacccagtcctcatatcatagagttcaacacacccatttgacagatggcaaaactgaggcttaaagagctgcttgagacttggccaaggttccaggtgccataccctctgtgcccctcccttaggcctgtgtgccccatggaagggtgggctgagatcgggatgacctgacacagctccctattgctgctaattccccctcggcctcctccaaggggtgggaattccaggccaagacccctacttcgcctttccttctccggctgccaagcaggacctttgccctcagccctttctcctgggatctccatgggggatgccatgagggcctcccaccacaaaagagaatttgggatcccctggtcccaggtttctccatcccttcttccttttccagaattttccaaataggaaagaacagaaggagaccagaaactctaggggggagaaagagaatgagagaaagagaatgagagagagagaaacacaaacacagtgacacagtgagagcttagtctccaagagcctattcattgattcaaacacccaagccacaggatacctcagatggccctcttgccagctggaagctctttctccaatgagcaaagttacagtgacctggctggagttacctggtgcacataggaccttaggggaaagttcagcgtggactacacttgctctgggatctgcttttccacatgtgtgtatggcacgcctttttctgctggattgggaaggacaagattttgctgtgctagggagaaatgaaaacggggtgagctgagtagctgggtttctggaggatagaacatcagatggggaggctttccgaggtgaagaatgagagggaaccacttactagagagaaaagagctccaggcctggggaacagcacgtgcgaaggccaggagagaagaactgttgaaacaacgagaagggtggcacggctggagctgagccagcaagggggatcgtgaggagccttggggttggggagatctgcagaagcatcagaccaggcagggcctcgtacgcagtcctgaggagttttacttttattctaagacagttggggagctccaggagctgttttaagttggggagagactggattccagcctgcaaaagctgttttgtgaagactaaaaccagtgaggagaggtggaggtgctttggggacactgaaatggattcttggaaagattctgaaggctgtgttgaaaagacacctatagctgtggggacatgactataatcccagcatttggggagaccgaggctggcagatcacttaaggtcaggagtttgagaccagcctggccaacatggcgaaaccccatctctgctaaaaatacaaaaattagctgggtgcagtggtgcatgcctgtagtcccagctactcaggagactgaggcgggagaattgtttgaaccctggaggcagaggttgtagtgagtcgtgatcacacaactgcactccagcctgggcaacagaacaatactccattccctcccctctaccccaccaaaaaaaaaaaaaaatcctgcccttagatgagctctagggctgctgagtacagttgtcccagttgcacagtgcccaagggtttggcattgctaagaaggccacgtgcaaatcctagatattgagtgttgtatgtttgtgacgttggtttcccgacatgtgaatggcccaagtgtctggaagaagtggcgccactttctaatttgcttggagatgttgcatgtcccttaaattcagacaggtgcaggtaactggaggttctgaaccaaaggttaaaatgcaaattctcatacagggttgggaagttgtagccagggataagcttatgtgactgttatatggactgaggagcagatgtgaatttcgaaccatgacatggctgagggtaggggtcgggtggatggatgattcagggttgtaacccatagagcccaaaggggaagtgatctgtgacctggggtgagggtgatctggaagatttttggatggctggaaagaaatggggaagtcgagctgcctgagagagccaagttatttcccaaaagattccttaggagtctttctgttcaagacctccgtgtgtgtgtgtgtgtgtttagggttccccagcaatggcccaggcatgtgaaggaaacaagcttcttcagggaatatttgttgaatgagttttcctgactcccaggctagaactgtttttgcaatttccaccctcttttctttcccccagagaactcctattcgtccttcaaaacccatcacggaaacccctcttggagaaaaccctccttccttcccctcaggactttcccagccaccgtctctcctccagtccagcctgatgccatgggactgggggtttctctgtccagctctgtttctcccagactggggtctgaggactctcaggacccccaactttacctagcacaggctgggcacaagtgggtgacagggagtctacgcctagtggaattatgtattggggcagggtcagtgtgagaatacacatccgcatgcatgtctgtccatgtctgtccgtaccaaccttccccttccacacggacctgggcacataggaggtgtctgagcctgacacatgggacagagagtggacatggctgagacacggacagagaaaagacaaggagtccagggggctgaaagccttttgaaatcaggaagttcctgtattggcagaacaaagcccagagaggagcagggctttcctcaacgccacccagcaagtggacacagagcccggccttggatgacacctccagggttctgaaccctggacctcgctttatgcaaggagctggccccacatttccatgaatcggggaaacagcacaagaaggttggcctgtggcagggcaagggttaaaggggtgacattgagggatgcctcagagtcaaagtcccctgaccaagaggaatagagtagaaaacacagagacagagggtgagatcacgccccgatgaggacggagagagacagagatggagagagacatagaggtggaaatatacagagaaagataaatgcagagaccaaggcagggagtgtcgggggaagtaaagagggtgtcctgaagaaagaaggatctgttcactcttaccagtctgtcctcgaatgatttgcataaaatgaggaggtgcctgtccacacccccaattcctctctcaggccccagagcctgagacctcaccatgcccccatcagagatgcaaaaaactaaacacccaactagaaatccttgggacctctctcggctgggatctcagagcctttctgtcccctacccctaccccatgtgctgtcgattttgcagatggggacaacctggggcctcccggaactctgccaccctggggaagttgggggagggccttagtcccggatcacaaccccgtctgctccccagaatcctttcctaagaatcgttgaggaccaaagttgtctttgctgacacgtgttgcttttctctttgccttttattgtttcagagaaaaatcaagttgactgtgtcaagtaacaccccaccccttacccccgtccagccatagtggctctctggagacacaggtcacaggcggagggtcccctgatcatccccaaccacacagccagggggacttgacccctgtccacccctgtctcgtgctccctcagacccccacaaaccggccaagcagtccggggaggcttcccctccacacaactcttagcatgtgattgcagatgtgaaatcaaaacgttgtttgttttttgttttgttttgattctaccccgtcggtccagtgtctgcacagacgccttcatttctctgtaaatatgtgacttggaacaaatgtttaacacaaacgagaagtggtcatgaatgcatggtgttgagatgttttgcactattctgactttttggtctctgtaaaaatattttattaacagcagacattaaaaaaagaaaaaccacacacagccttgga

SEQ ID NO: 7 - RNA, 9914 nt, Homo sapiens
  source 1..9914: mol_type = mRNA
ctgaaccaagatggccggtggcggccgggccccggcgtgagccaagcgcgggctgcagccgggagatgccccagcccagcggccgctgagcccgacccgacagagccggcccggccgcctccggcccacctgcgagctcggagacatgtctctgctttgcgttggagtcaaaaaagccaagtttgatggtgcccaagagaaattcaacacgtacgtgaccctgaaagtgcagaatgtcaagagcacgaccatcgcggtgcggggcagccagcccagctgggagcaggatttcatgttcgagattaaccgtctggatttgggactgacggtggaggtgtggaataagggtctcatctgggacacaatggtgggcactgtgtggatcccactgaggaccatccgccagtccaatgaggagggccctggagagtggctgacgctggactcccaggtcatcatggcagacagtgagatctgtggcaccaaggaccccaccttccaccgcatcctcctggacacgcgctttgagctacccttagacattcctgaagaggaggctcgctactgggccaagaagctggagcagctcaatgctatgcgggaccaggatgaatattcgttccaagatgagcaagacaagcctctgcctgtccccagcaaccagtgctgcaactggaattattttggctggggtgagcagcacaacgatgaccccgacagtgcagtggatgatcgtgacagtgactaccgcagtgaaacgagcaacagcatcccgccgccctattatactacgtcacaacccaacgcctcagtccaccaatattctgttcgcccaccacccctgggctcccgggagtcctacagtgactccatgcacagttacgaggagttctctgagccacaagccctcagccccacgggtagcagccgctatgcctcttccggggagctgagccagggaagctctcagctgagcgaggacttcgaccctgacgagcacagcctgcagggctccgacatggaggatgagcgggaccgggactcctaccactcctgccacagctcggtcagctaccacaaagactcgcctcgctgggaccaggatgaggaagagctggaggaggacctggaggacttcctggaggaggaggagctgcctgaagatgaggaggagctggaggaggaggaggaggaggtgcctgacgatttgggcagctatgcccagcgtgaagacgtagctgtggctgagcccaaagacttcaaacgcatcagcctcccgccagctgccccagggaaggaggacaaggccccagtggcacccaccgaggcccccgacatggccaaggtggcccccaagccagccacgcccgacaaggtgcctgcagctgagcagatccctgaggctgagccacccaaggacgaggagagtttcaggccgagagaggatgaggaaggccaggaggggcaggactccatgtccagggccaaggccaactggctgcgtgccttcaacaaggtgcggatgcagctgcaggaggcccggggagaaggagagatgtctaaatccctatggttcaaaggcggcccagggggcggtctcatcatcatcgacagcatgccagacatccgcaagaggaaacctatcccactcgtgagcgacttggccatgtccctggtccagtccaggaaagcgggcatcacctcggccttggcctccagcacgttgaacaacgaggagctgaaaaaccacgtttacaagaagaccctgcaagccttaatctaccccatctcgtgcacgacgccacacaacttcgaagtgtggacggccaccacgcccacctactgctacgagtgcgaggggctgctgtggggcatcgcgaggcagggcatgcgctgcaccgagtgcggtgtcaagtgccacgagaagtgccaggacctgctcaacgccgactgcctgcagcgggctgcggagaagagctccaagcacggggcggaggaccggacacagaacatcatcatggtgctcaaggaccgcatgaagatccgggagcgcaacaagcccgagatcttcgagctcatccaggagatcttcgcggtgaccaagacggcgcacacgcagcagatgaaggcggtcaagcagagcgtgctggacggcacgtccaagtggtccgccaagatcagcatcaccgtggtctgcgcccagggcttgcaggcaaaggacaagacaggatccagtgacccctatgtcaccgtccaggtcgggaagaccaagaaacggacaaaaaccatctatgggaacctcaacccggtgtgggaggagaatttccactttgaatgtcacaattcctccgaccgcatcaaggtgcgcgtctgggacgaggatgacgacatcaaatcccgcgtgaaacagaggttcaagagggaatctgacgatttcctggggcagacgatcattgaggtgcggacgctcagcggcgagatggacgtgtggtacaacctggacaagcgaactgacaaatctgccgtgtcgggtgccatccggctccacatcagtgtggagatcaaaggcgaggagaaggtggccccgtaccatgtccagtacacctgtctgcatgagaacctgttccacttcgtgaccgacgtgcagaacaatggggtcgtgaagatcccagatgccaagggtgacgatgcctggaaggtttactacgatgagacagcccaggagattgtggacgagtttgccatgcgctacggcgtcgagtccatctaccaagccatgacccactttgcctgcctctcctccaagtatatgtgcccaggggtgcctgccgtcatgagcaccctgctcgccaacatcaatgcctactacgcacacaccaccgcctccaccaacgtgtctgcctccgaccgcttcgccgcctccaactttgggaaagagcgcttcgtgaaactcctggaccagctgcataactccctgcggattgacctctccatgtaccggaataacttcccagccagcagcccggagagactccaggacctcaaatccactgtggaccttctcaccagcatcaccttctttcggatgaaggtacaagaactccagagcccgccccgagccagccaggtggtaaaggactgtgtgaaagcctgccttaattctacctacgagtacatcttcaataactgccatgaactgtacagccgggagtaccagacagacccggccaagaagggggaagttctcccagaggaacaggggcccagcatcaagaacctcgacttctggtccaagctgattaccctcatagtgtccatcattgaggaagacaagaattcctacactccctgcctcaaccagtttccccaggagctgaatgtgggtaaaatcagcgctgaagtgatgtggaatctgtttgcccaagacatgaagtacgccatggaggagcacgacaagcatcgtctatgcaagagtgccgactacatgaacctccacttcaaggtgaaatggctctacaatgagtatgtgacggaacttcccgccttcaaggaccgcgtgcctgagtaccctgcatggtttgaacccttcgtcatccagtggctggatgagaatgaggaggtgtcccgggatttcctgcacggtgccctggagcgagacaagaaggatgggttccagcagacctcagagcatgccctattctcctgctccgtggtggatgttttctcccaactcaaccagagctttgaaatcatcaagaaactcgagtgtcccgaccctcagatcgtggggcactacatgaggcgctttgccaagaccatcagtaatgtgctcctccagtatgcagacatcatctccaaggactttgcctcctactgctccaaggagaaggagaaagtgccctgcattctcatgaataacactcaacagctacgagttcagctggagaagatgttcgaagccatgggaggaaaggagctggatgctgaagccagtgacatcctgaaggagcttcaggtgaaactcaataacgtcttggatgagctcagccgggtgtttgctaccagcttccagccgcacattgaagagtgtgtcaaacagatgggtgacatccttagccaggttaagggcacaggcaatgtgccagccagtgcctgcagcagcgtggcccaggacgcggacaatgtgttgcagcccatcatggacctgctggacagcaacctgaccctctttgccaaaatctgtgagaagactgtgctgaagcgagtgctgaaggagctgtggaagctggttatgaacaccatggagaaaaccatcgtcctgccgcccctcactgaccagacgatgatcggaacccagatgatcttcaatgcagccaaggagctgggtcagctgtccaaactcaaggatcacatggtacgagaagaagccaagagcttgaccccaaagcagtgcgcggttgttgagttggccctggacaccatcaagcaatatttccacgcgggtggcgtgggcctcaagaagaccttcctggagaagagcccggacctgcaatccttgcgctatgccctgtcgctctacacgcaggccaccgacctgctaatcaagacctttgtacagacgcaatcggcccagggcttgggtgtagaagaccctgtgggtgaagtctctgtccatgttgagctgttcactcatccaggaactggggaacacaaggtcacagtgaaagtggtggctgccaatgacctcaagtggcagacttctggcatcttccggccgttcatcgaggtcaacatcattgggccccagctcagcgacaagaaacgcaagtttgcgaccaaatccaagaacaatagctgggctcccaagtacaatgagagcttccagttcacgctgagcgccgacgcgggtcccgagtgctatgagctgcaggtgtgcgtcaaggactactgcttcgcgcgcgaggaccgcacggtggggctggccgtgctgcagctgcgtgagctggcccagcgcgggagcgccgcctgctggctgccgctcggccgccgcatccacatggacgacacgggcctcacggtgctgcgaatcctctcgcagcgcagcaacgacgaggtggccaaggagttcgtgaagctcaagtcggacacgcgctccgccgaggagggcggtgccgcgcctgcgccttagcgcgggcggtcggccgagcggcactgcgcctgcgcggagggcgctgggcggggagggacggggcttgcgccttggtgggacctccccaggggcggggctcggggggctccacgccaagggtgggctgcgcctacgcccttgactcagctttcccttttggggaattaggaatggaggatgccccgccctctcgggaggccacgcccaagggcgcgacgaaggaaggagccacatccccaacttgaggccacgcccccagcacctagggggcattttgagctgggatgggggaaacctcgtccctatggaggaggccacatcccggggctctggtaccgggaggcaccacctcatgtcccctggaaaagccataagatgggacccagacccctgggaccccagaccaattgccaagtatggaaatctcagctccctcgagggggggccctgggcaaggggtagggctctctggagcgcccctctaggtggcctggggactggagggaccaggatgctggttggagggccccggaataccggagtccctttagatatttgtgcaaaaaataaatggggggaggggggaggatgggatttcaaaagcacatgcgcccttgggcgcccaaaccctgggggccgaggggacggctctggttccccacgctgcccctacttccctttgggagtttgcctctccctctcccccaacaaacccagtcctcatatcatagagttcaacacacccatttgacagatggcaaaactgaggcttaaagagctgcttgagacttggccaaggttccaggtgccataccctctgtgcccctcccttaggcctgtgtgccccatggaagggtgggctgagatcgggatgacctgacacagctccctattgctgctaattccccctcggcctcctccaaggggtgggaattccaggccaagacccctacttcgcctttccttctccggctgccaagcaggacctttgccctcagccctttctcctgggatctccatgggggatgccatgagggcctcccaccacaaaagagaatttgggatcccctggtcccaggtttctccatcccttcttccttttccagaattttccaaataggaaagaacagaaggagaccagaaactctaggggggagaaagagaatgagagaaagagaatgagagagagagaaacacaaacacagtgacacagtgagagcttagtctccaagagcctattcattgattcaaacacccaagccacaggatacctcagatggccctcttgccagctggaagctctttctccaatgagcaaagttacagtgacctggctggagttacctggtgcacataggaccttaggggaaagttcagcgtggactacacttgctctgggatctgcttttccacatgtgtgtatggcacgcctttttctgctggattgggaaggacaagattttgctgtgctagggagaaatgaaaacggggtgagctgagtagctgggtttctggaggatagaacatcagatggggaggctttccgaggtgaagaatgagagggaaccacttactagagagaaaagagctccaggcctggggaacagcacgtgcgaaggccaggagagaagaactgttgaaacaacgagaagggtggcacggctggagctgagccagcaagggggatcgtgaggagccttggggttggggagatctgcagaagcatcagaccaggcagggcctcgtacgcagtcctgaggagttttacttttattctaagacagttggggagctccaggagctgttttaagttggggagagactggattccagcctgcaaaagctgttttgtgaagactaaaaccagtgaggagaggtggaggtgctttggggacactgaaatggattcttggaaagattctgaaggctgtgttgaaaagacacctatagctgtggggacatgactataatcccagcatttggggagaccgaggctggcagatcacttaaggtcaggagtttgagaccagcctggccaacatggcgaaaccccatctctgctaaaaatacaaaaattagctgggtgcagtggtgcatgcctgtagtcccagctactcaggagactgaggcgggagaattgtttgaaccctggaggcagaggttgtagtgagtcgtgatcacacaactgcactccagcctgggcaacagaacaatactccattccctcccctctaccccaccaaaaaaaaaaaaaaatcctgcccttagatgagctctagggctgctgagtacagttgtcccagttgcacagtgcccaagggtttggcattgctaagaaggccacgtgcaaatcctagatattgagtgttgtatgtttgtgacgttggtttcccgacatgtgaatggcccaagtgtctggaagaagtggcgccactttctaatttgcttggagatgttgcatgtcccttaaattcagacaggtgcaggtaactggaggttctgaaccaaaggttaaaatgcaaattctcatacagggttgggaagttgtagccagggataagcttatgtgactgttatatggactgaggagcagatgtgaatttcgaaccatgacatggctgagggtaggggtcgggtggatggatgattcagggttgtaacccatagagcccaaaggggaagtgatctgtgacctggggtgagggtgatctggaagatttttggatggctggaaagaaatggggaagtcgagctgcctgagagagccaagttatttcccaaaagattccttaggagtctttctgttcaagacctccgtgtgtgtgtgtgtgtgtttagggttccccagcaatggcccaggcatgtgaaggaaacaagcttcttcagggaatatttgttgaatgagttttcctgactcccaggctagaactgtttttgcaatttccaccctcttttctttcccccagagaactcctattcgtccttcaaaacccatcacggaaacccctcttggagaaaaccctccttccttcccctcaggactttcccagccaccgtctctcctccagtccagcctgatgccatgggactgggggtttctctgtccagctctgtttctcccagactggggtctgaggactctcaggacccccaactttacctagcacaggctgggcacaagtgggtgacagggagtctacgcctagtggaattatgtattggggcagggtcagtgtgagaatacacatccgcatgcatgtctgtccatgtctgtccgtaccaaccttccccttccacacggacctgggcacataggaggtgtctgagcctgacacatgggacagagagtggacatggctgagacacggacagagaaaagacaaggagtccagggggctgaaagccttttgaaatcaggaagttcctgtattggcagaacaaagcccagagaggagcagggctttcctcaacgccacccagcaagtggacacagagcccggccttggatgacacctccagggttctgaaccctggacctcgctttatgcaaggagctggccccacatttccatgaatcggggaaacagcacaagaaggttggcctgtggcagggcaagggttaaaggggtgacattgagggatgcctcagagtcaaagtcccctgaccaagaggaatagagtagaaaacacagagacagagggtgagatcacgccccgatgaggacggagagagacagagatggagagagacatagaggtggaaatatacagagaaagataaatgcagagaccaaggcagggagtgtcgggggaagtaaagagggtgtcctgaagaaagaaggatctgttcactcttaccagtctgtcctcgaatgatttgcataaaatgaggaggtgcctgtccacacccccaattcctctctcaggccccagagcctgagacctcaccatgcccccatcagagatgcaaaaaactaaacacccaactagaaatccttgggacctctctcggctgggatctcagagcctttctgtcccctacccctaccccatgtgctgtcgattttgcagatggggacaacctggggcctcccggaactctgccaccctggggaagttgggggagggccttagtcccggatcacaaccccgtctgctccccagaatcctttcctaagaatcgttgaggaccaaagttgtctttgctgacacgtgttgcttttctctttgccttttattgtttcagagaaaaatcaagttgactgtgtcaagtaacaccccaccccttacccccgtccagccatagtggctctctggagacacaggtcacaggcggagggtcccctgatcatccccaaccacacagccagggggacttgacccctgtccacccctgtctcgtgctccctcagacccccacaaaccggccaagcagtccggggaggcttcccctccacacaactcttagcatgtgattgcagatgtgaaatcaaaacgttgtttgttttttgttttgttttgattctaccccgtcggtccagtgtctgcacagacgccttcatttctctgtaaatatgtgacttggaacaaatgtttaacacaaacgagaagtggtcatgaatgcatggtgttgagatgttttgcactattctgactttttggtctctgtaaaaatattttattaacagcagacattaaaaaaagaaaaaccacacacagccttgga

SEQ ID NO: 8 - DNA, 94017 bp, Homo sapiens
  source 1..94017: mol_type = other DNA
cagtggctcacacctgtaatcccagcactttgggaggccgaggtgggtggatcacttgaggtcaggagttggagaccagcttggccaacatggtgaaaccctgtctctacaaaaaatacaaaaattagccgggcatgatagagagtgtacctgtaatcccagctactcgggaggctgaggcaggacaatcccttgaatctgcgagacaggttacagtgagctgagatctcaacactgcactccagcctgggcgacagagcaagactccatctcaaaatgtaccctgtaacaatatataagatgtcaacattagtagaagcactcaagcctagatgatagagagagattcagtctcaaaaaaaaaaaaaaaaaaaaaaagagaaagaaatggataaaagacttgaacaggcatttcaccataaaaagaaaccagtaatcacataaaaagttcaacgtcaagagcaatcagaaagcaaaccaaaacccaaatgaggcactccttccctccctccacataggcccagtgaaaaaacttggacaattcaaagtgttggcaagaacttagagccaggcacggtacctcatgcctggaattccagcactttggcaggccgaggcaggaggatcactggagctcaggagtttgagaacagcttgggcaacatagggagaccccatctaaaaaaaataaaatgagccaggcatggtagcacaggcttgtagtcccagctccttgggaagctgagacaggaggatcgcttgagcccaggaggtggagactgcagtgagctgtgattgcaccattgcactccagcctgggcctcagagtgagactatctcaagaaaaaacaaaaaccaataacaaaacaaaaacaaaacatagaggaaccgatgattatactgtgttggtatgatgaaaatcgccagactcccaataaaaaacatgacattatcaggtgaagctgagcatatatgtattttcttttctttctttccctccttttttttttttttttttgagacagagtcttgctctgtttccaggctagagtgcagtggcgtgatatcggctcactgcaacttccgcctcctggattcaagcaattctcctgcctcagcctcctgagtagctgggactacaggggtgtgccataatgcctggctatttttgtgtgtgtttttagtagagacagggtttcaccatgttggccaggatggtctcgatctcttgacctcatgatctgcccatctcagcctcccaaaatgctgggattacaggcatgaaccaccatgtctggccacatatatgtattttctgacccagccatccttactcatgtgtgccagcacacaagtctgaagtctgaggatggtcataaaaacttttttttgtaataaacctgagcttgaaacaacccaaaagtccatgacctggagaacagatgaatagccaatagaagattcatacaaaggaatactatgcagcagtaaaaaatgcaagccttacagccacatgcagcgatatggatgaatatcagcagaatcacattgagcaaacaaaacagattagcagtccaggtgctgtggctcacacctgtaatcccagcactttgggaggctgaggtgggtggatcacctgaggtcaggagtttgagaccagcctggccaacatggtgaaaccctgtctctactaaaaatacaaaaattatcactgcaacctccatggccaggcatagtggctcatgcctgtaatcccagcattttgggaggccgagatgggcagatcacctgaggtcaggagttcgagaccagcctgaccaacatggagaaaccccgtctctactaaaaattacaaaaaaattagctgggcatggtggcacatgcctgtaatcccagctactcaggaggctgaggcaggagaattgcttgaacctgggaggcggaggttgcggtgagctgagatcgtgccattgcactccagcttgggcaacaagagcaaaactctgtctcaaaaaaaaaaaaaaaaaaaaaaaaaaaaaaaaagccaggcaaggtgatgggcgcctgtaatcccagctactcgggaggctgaggtaggagaatcgcttgaacctgggaggcagagattgcagtgagcggagattgtgccactgcactccagcctgggtgacagagtgcagctctgtttcaaaaaacaaacaaacaaacagattagtaaagaatgtgaacaaagtcaaatgaggtggctcatgcctgtaatttcagcactttgggagtccaaggcaggcagattgtttgaaccccagagttcaagacaagcctgggcaacatagtgagaccctcatctctaattagccaggcatggaggtgcatgcctgttgttccaggtacttgggaggctgagacaggaggattgtctgagctcaggagctcacaccactgtactacagcctgggtgacacaatgagaccttgtctcaaaaaaatagaaacatgcaagaggtaaccatgtattgtttgctaaggagcatgtggtaaactataaggaaaaggaagaaaatgaaaaacaaaatttgtgatagttcttccatctgcagggaaggattatgagattggggagaggcacatgggggtcttttattgtgatggtatttttttttttttttgagacggagtctctctctgtcacccaggctggagtacagtggcccgatctcggctcactgcaagctccgcctcccggattcacgcctttctcctgcctcagcctcctgagtagctgggaatacaggcgcccgccaccacgcccggctaattttttgtatttttagtagagacgggttttaccgtgttagccaggatggtctcgatctcctgaccttgtgatcaccccgcctcagcctcccaaagtgctggtattataggcgtgagccaccgagcccggtcgatggtaattttttttatccaagcctgctcctcatagtttatctactcattgatgtttaataaaacatcaatgttttattgattatcaatgtttaataaaacatctactcattgatgtttaataaaaatttaagaccaggcatggtggctcatgagcctgtaatcccaacattttgggaggctgagacgggaggatcacttgagcccaggagtttgagacagcctgtgcgacatggtgaaactctgtctctacaaaaaatacaaaaattagctgtgctgatttttttaaaaatttaaagcagtgacagatacaaacatggttactattaggcattaagattacaactggggccaggcgcggtggctcattcgtgtaatcccagcattttgggaggccacggtgggtggatcacttgaggtcaggagtttgagaccagcctggccaacatggtgaaaccccatctctacaaaaaatacaaaaaaattagctggatgtggtggcgagcgcctgtaatcccagctactcaggaggctgaggcaggaagatcacttggaggttgaggttgcagtgaactgagatggtgccactgcactccagcctgggccacagattgagactacacctccaaaaaaaaaaaaattacaactggtttcacatgttaactcatgtaatacctccagcaaccttgtgaggcaggacttgttatcatattcattctacaggtgcggaaactgaggcacgaggaggtcacaagacctgcccaaggccatgcttgtgatgagagacagagtttggttttgaacaatggcctcactcaactccatgcacattctgcatttatgaagctctttcatgtgggctgggggcaggagaccctgtggggctcagcctttcatgctagtttaggtgccagtgatacagcgagcaggttgcagggcaaggggcccacatggagctgcccagtttgatatgtggggagggggccaggcgcagtggctcaggtctgaatcccagcactttgggaggccgagatgggcggatcccctgaggtcaagtgttcaagaccaggctggccaacatggtgaaacctcgtctctactaaaaataaaaaaaataaaataaaaaaaaaaagctgggcatggtggcatgcgcctgtagtcccagctactcggggaggctgaggcaggagaatctcttgatcccaggaggcagaggttgcagtgagccaagattgcgtcactgcattccagcctgggctgcagagggagactccatctaaaaaaaagaaaagtggggaggagtggcagagtttcgttcgggtcagggcccaatcagaggaagggataggggctgggggagtccagagaggagaaacaaaggctcagcttggggcagtcagggaagccttcctggaggagaggatattcagacaagacattgatggatgaaaaggagttcagagtgtgggcaaggacccatgggctggatggcttagagacatagagagagacctagacaggatgcagtagagctgcaaaaagactttacagagagaggctaagagacacatgactgagagagcagtggacagagtcagaggaacagagacccagggagagaaagagaccaggcagtagagttagagagacagagacgtagagacagaggaagagagatactcagagaacaggaccatctgcccggtgctggtgccgggcgtacacacaagagcttgcatttgcctgtacttgcttgagtattgcagggaggcgtttgcccaggttaccagggcaggaatgtccatgcatgggtggcgggggcacgtgcaccatttcagtgcaggtgagggtctgcacaggaggaaacctgcttgggggccgccgtcgccccttgtccccctgcaacgaggaggtgtggggcgaggcgccccttcccggagccaggccctttaacgcccccccagcccgcagcgcccccgccccatcaggcgtccctgggctccgcctgcccgccccgcatcagcgccacgtcaggcgctgtccgcgcccccggtgctgaaccaagatggccggtggcggccgggccccggcgtgagccaagcgcgggctgcagccgggagatgccccagcccagcggccgctgagcccgacccgacagagccggcccggccgcctccggcccacctgcgagctcggagacatgtctctgctttgcgttggaggtaggaggcgaggctgggggtcgggggacccgtgtggacgcgggctggggtcggggtccgcgtggatgcggctcccagggggttcctggggggtgacccgagtccaggtggctggacttttgagaggggtagcccttgtcgacgcagctgggccccggagggggtgatccgtgtagacgcggcagggctctcgggggtcctggtggccgctgctggaggggtcgtgtggacgcggctgaacgcggaggcccgtgtggacgtggacgggtatccggggttctacccggaaacgatctagactggggcgtctgtgtagaccaggtttttagagggtcagtgaggaagagtctgggctcggtagtttgattgaagcctgcaggggtgcttggaaggggtctggtgttgtgggctgggttacgggtcctcatggacgcggacccggctggaaattcgaaggagagtgcggtgggagggttctccaagccgtggggatgtaagatataggtagaggggcttggccatcagggcatccacgagttctaggactctcccagccctaggtgtaaagaggactggagtggggggagtgtggagacaggagacccctcccagcgtccagagagggctgtgactggaggtctgggggcgcttttccagttaactctttggcctcccgagtgagggggttggaggaatgtccagaaggtcttcccgctccctgccccctccggttctcccaaacacgtttcagggccttctcggcagggagcctacttcttggaagagcaatgtctcctggtccccctcctggcccatcctcacctcacccactttgcactggagagagggagggagggagacgtgaggtggggggggagctattttggggccagaacgccatctgcacagaggcccacgcccaggcccacgctctgcgttggggttggaggagggagggagacgtgggaggggcatgaccccccaccccacacctttatggctctggggtcgtggggaagccagcccaaccgaacccaggcgttctgggcactcccgtttgagaaatcaaactctgggagaccttgggcggcaggggtggatgtggaccgccgttccacgcctacagagctctgaacccctggttcttaaggactggggtccccccgtcactcccacccatttcaagaaggctggggtgggggaaggggtgtgtctgccaagcctgagactgcaggcttcgggagacctcgggcgacaggaagcgtgcgtgtgctgaactcctgctgcctggacacagggtgggcaggccggggagccgggaaccgcccccgccgcccctcctcctccctcccctccccctcggccgattcattcacaaaccctgccccgcccgcccgctccccgccgcggcagcttccgagtgcaaatccggccgggctgggccggcgtggacgcgggtgttcttaaagggacaggggcctactttctctaagctcgtttctgctggacggggctgggggtggtggaagaagggtccctagagtcaaaggtcaactcctccatcccctagcctccaggcctatggagttaggggagtagggaagtgaaggagacccctaggcgacccccaccgcctaggcctgaggacggaatgggaggagaacttgaatgtccagaccccctactgacctctccccctgctctaagtagccgggctcttaaaggtggcactggaggaggttccgacgtgggtgttcttggctgactcctctatcctctctcttctccccccagcatcccgccccaccccgcctcacatcctccaagttgggcttctctggaaggtttgcctagtggagtgggggggggggggggggggcggggatctcacccttaactctgacgcaaacaggaggctcggctgcgggggtggcattaagggggggcagcaggaggcaagagggatgaggcttccagaaacagagacgttgggggaggactgtgctggattctgtggactttacagggaggggcccggctgagtggagaggaatcgctgggaggggcaaggctggggaagaggttgacaggggtgggaggtaaggccctcaggtgtaaagggaggtgtgaggttggagtgaggaggagtaggaggcagggaggggtggggagagggagaagtgctgggtgaggccagtctcccagggagaggtgggatggtgcccagagaggggaggggctgggatggctgagcacgagagatgttggggtgggcttggcaggagtgaagctaggctgagatgggttgccgtgttgcctgagctcagctgaggaaatacctgtcccccctcccctccaccggggacccacaggcgtttgccaatccctacacacattcatacccagacttgttcctgtgtggacacaaatgcttaggatgtatgaaggctctacgcagaccatgtgcctgggaaggcacattccgtaggcacacgtgtgtactcaaatgcctgtgtgaacacaagcatacacgtgtatataggacacagtctgccgctacagatatagtcccagcaacacacgtgtgagtgtgtgtgtctgccagcacgcatatagatgtatccacgtgtctgatgaatgctcacaatatacatgtcacataaagatccacccatgtccagccgagcgcggtggctcaggcctgtaatctcatcactttgactttgggaggccaaggtgggcagatcacttgaggtcaggagttcaagaccagcctggccaacatggtgaaactttgtcactgctaaaaaataaaaaaaattagccaggtgtggtggcgcgcacctgtagtctcagctactcgggaggctgaggaaggagaatcacttgaataggggaggtggaggttgcagtgagctgagatcctgccactgtactccagcctgggcaacacagtgagactctgtctcaaaaaaaaagattcactcatgtcctaacactcagacatgtacccatacatatctgttaaggtccccaaccccatgaagcacatatatattcatataagcacatgtcaaagccatgtgtgtatgcacatgacaacacttgcctggacattcaaagcagcccctttcaacaagtggatgatgatgcatacaagtaaatacacatttgagtatttcattgcacacaagtgcatacatgtatgcagataaacaaatacagctgccacagaactgcatccatgtacacatgcaaacatcaatatgtgtgttttccacctaacatatcacccacaagctcacacacaccagtgtgtctctgatgtagtgacaccccactcctagacacacatgtgcagactcccacctgcacttaaatggtgcacatactctgcacacatgcacactcatatccatgtagaggcaggcacctgcctgccctggtaagatgagccaactactgctgcaaatacccaagcaagtacaggcaaatgcaagctcttgtgtatacacccagcaccaacacatagcagaccaccctgtatggtgtatgggccttatctctgcccgcttcatttatttattcatgtggtgccccgctgcttcccaacatcgtaatccactgactaggtcttggcaggatcctgaggctgtgaatggtaaatgccacctggttccttcatgaagtcacttattttatttatgcaacaagcattaattgagcacctactgtataccaggcactgttcctggctctgggacccagccctattcctagccatcactcctgcacgtcccatggggttagaatgaaagagatgagggagggctaagggagctgaggagtggggtatccagggctctcttcctctgggaagcctaccctgattccaccaccaccatttacttgagtctcagaagatgtgatgagggggagatgagcaggagggagatggtgctctgggtggagggaacagcatgagcaaaagcatggtggtgtgaagggttacttccagatcttcctatgtgcctcacagcattttgcacaggccacttgatgttttgttttgttttgagacagagtctcactcaaagcctgttactcaggctgcagtgcagtggcatgatctcagcttgctgcagccttgacctccagggctcaagtgatcctcctgcctcagcctcccaagtagctgggagtataggcatgcaccaccacacccggctgacttttttctttttaattttttgcagaagcagggttttgccctgctgcccaggctggtcttgaactcctgggctcaagtgattcaccctcctcagcctcccaaagtgctaggattacaggtgtgagccaccacgcccaactgatgttttaaaggctctataaacatgttatgaataaatgacatgaacaaatcagtgaatttaggtgagggtgggtttgcttcacaacttacaataatatcaacaacaaaccccatttatccagcttttttgtttgtttgtttgttttttgagacacggtctcactctgtcacccggactgcagtgtagtggtgtgatctcggttcactgaaacctccaccttccaagttcaagcgattttcctgcctcagcctcccgagtagctgggattacaggcacgtgctaccacacctagctagtttttgtatttttagtagagatggggtttctcatctctactaaaaatacaaatacatctctagtggccaggctggtcttgaactcctgacttcaagtgatcctcttgcctcggcctcccaatgtactgagattacaggctcgagccaccgtgcccagcccagcatttcataggcatgatgttaaggatttttatgcccatgccctctttaactcttacagtagccccattgtacagatgaggaaaactgaggctcagggagctttaacaacttgcctggtggaacagagccagaggtggagctgactgactctagagcctactggggttggcagaagtttgagccttctctcagaccccaggacctcggagacagccaagtcccttctgtggagtgatgttctgccctgggattgccttcttctttctatttatttatttattggagacagagtctggctctgttgcccaagctggagtgcagtggcacaatttcagttcactgtaacctcctcctcccgggttcaagcaattctcctgcctcagcctcctgagtagctgagattacagatgcacaccatcatgcccagctaattttttgtatttttagtggagatggggtttcaccatgctagccaggctggcctcgaactcctgaccaccaagtgatctacctgctttggcctcccaaagtgctgggattacaggcatgagccactgtgcccagccaggattgctttcttctctcatgcatctagtaaacagacatgtcacaatctctccattcatcggggctattcccctgctccttgcctaagaagccttcacacatccctccgttcctggctactcagtccctgataccctccagctaggaggagctgcatctaggtcttagctcctaccgttctcatgggatgccctccagagttgcatcttcagggctgcagcctaaccctttccctaacctggcctcacttttcttccacatacaatggacctcttctgcaaggtgccaataagggcatcctgggtccagcaggcctgagtgtgaattgctaagtccaccacttcctggcaagtctcacatcctctgcattccttggtgtgctcatctgtggaatgggcacaggagtagcatccaccatctacgtttgccagaactctctaatgaggcttgcagagcccctggcatgactcctggcctacgggaaggcccaataatcgtgagcaaaagacatgaaaaatcaatgatgggccggccccggtggctcacgcctgtaatcccagcactttgggaggcctaggcgggcagatctcctgagctcaggagttcaagaccaccctgggcaacatggtgaaaccctgtctttactaaaatacaaaaaaattagctgggtatggtggcgcgcgcctgtagtcccagctactcagggggctgaggcacgagaatcgcttaagccccgaaggcggaggttgcagtgagccgaggtcgcgccactgcactccagcttgggctacagagtgagactccgtcaaaaaaaaaaaaaaaaaaaaatcaatgatgatgtttttattaatggagactaaaagctttctggaaggcggttctgagtgcaggacatttctgagagtccactgcattctggggcccgaggagcgctccaagaggggtcccccagggccactccaggagggagcctagttcgttgagggtacacgggtgggaccgagcattcagcaccgtggacagcgcctgcccgcgcctctgggggacagctcttagctcagcctcccaggattaatggaggaggtgacgtcattccttccgtgaattactatttaatgagcacctactataggctaggcctacttctaagtggttcatggtaaacaacacacacacaaatcccttattcccgaagctctctggaactccaggttcttggtgttttttacactgaaggctcagtctggctctggtctatttgtgtcaacggaggataagggtcctcatttagtgtctcccagatgcgaaaccagcacagctgaggtcttttatcctaaagcccatccatctcccgctgaaatgccctccaccaacatcacacacaaaacgatcaaatctcctataatctatttctggattctctatgcttcctcccttcccccaagctaatcctggggcgggtgggctttcagaagccctagacggctggatctccacctcctgtctccccaccccatcccacgtggcaggtcagggagccagtgccccaagactgcagtcccccctaattagaatccagggtcagtcagccatgtggttcacgcctgtaattccaacactttgggaggccgaggggatggcttgagccttgaagccagccatagcaacatagcaagaccccatctctacaaaaaaaaaaaaaaaaaaaaaggaatagccaagcatggtgatgcgcacctgcagtctcagctactcgagaggctgagtggggaggatcgcttgaacctgggagatcgaggctgcagtgagccatgatcacaccactgccctccagcctggagcctgggcaacagagagagaccctgtcaaaaaaaaaaaaaaaaaaaaaaagaaaagaaaagaaaaaaaaagaagaagaagaagagaaaagaaagaaaaagaaaagaatccagggtattcaaatcctagaatccaggccagggacacctttagaacacaaccaaataataaaaacagtaaagatatcagtaataataataatagtataaatgacactataatcattctgcagaaggggtgagggaggaagaggagggaagaagaggaggagaaaggagagggaagggagatcagccactccgtctccccattttccagatgcagaaacggaggcgcgaagccaggctgcaggggtgtcccgcagcctgaactcctgcctcagcctccccgggtacggccactacattcatcagtcagcgcttctgggggccccaaagacctttgaggccgcatgacgcggtgtcttcacccgctcgtcgctggggacagcagtgggcacccccctcatccccgcccccctgtccgccggcgcgcctcccacgccctccgcgcgcccacgctataaatagcctcatgcgtgtgacccgaagcccgctggggaagggtggcgcttccgccccgctgaccctgatacagcaacccggcgcaggcggggaggtggcgggatgtgacgacgaagacggtgactcagggaccatttactgaccggggaagacagggagagagactgggttccttctctgagcccccttcctcctccaagcctctcccccgataccaccctcccctctgcgcccatcccccttcccgaatcccctccctcaccgcgaacacccttccctcctgagaaccccctcgccactctcggccccctttcctgtccccttttccctctgagacccctctcccactgggagccccagtgatgaaaaatcatggatgtcctcaacctggacctcggcagggagctaagtgcaggagcctggcttcagctatcagagggtacagccctccagccggtcccccactgcctgaggaccccaacggagaccattcccctctagccaagagaggctgcaggaaggagctgaggcttagggaagaggagccggactgaccaagggaggggcacaagaagggcagagacagtgagagagagaaggagagaacagagaccaaaagaagacgaccagagtggagagaaatagaacggggaggagggagatgagagacagggattgggaaagagagagagagaacagatcaaggagctactgggctccccgctgagcctaaatccatggtttataaaacagggcacagttggaggagcttcaagtgagcccagcccagtctagaccccagtgagccccttgtatcaccccccagagcctgtcactttcccacccccatatgcatccctacttttctcccccaactgcctctcctctccccagtgtctcctccacctgcctgccctccctagtggaaatctttccccctctctcttttattattattattattattatatattttttgagacagagtcttgctctgtcgcccaggctggagtgcaatggcgtgatcttggctcactgcaacctccgcctcctgggttcaagcgattctcctgcctcagcctcccgagtagctgggactacaggcgtgcaccatcatgcccggctaatttttgtatttttaatagagatggggttttaccatgttgcccaggctggtctcgaactcctgacctcatgtgatccacctgcctcggcctcaaagtgctgggattacagatgtgggctaccacgcccagcctctctcccttttaaattattatttttagacatgggatcttactacattgcccaggctggtcttgaactcctgggctcaagggatcctcctgccttagccttcctagtagctgggattacaggcatgtgcctctatgcctggtactctcgctgtctccttgtgtctctctatttctctccatctgtccagactctcctctcttgctttcatgcccatcatttcttcctctctcctctcccttcctctccctgtatgagtccctccagctgtgggtgcctttctcagcctctgtcagcatcccctccacccccgatcccgtcacattctacctcttgccccttcccctgcccacccccttcacagagagtccccacgcctgcaggctggacctcctccaggagccaggcccaaagctcctgctgggcacattcctgagtgttcctgagcctctttcagtcccaggggtgaggtgctgggtgggtgcgctccctgggggctgggtggggctgaggatgtgagcgaacaaaccagacctagaaaaaaaaaagacagagatggaagcagagatgaaggcccagagagaggggttcacttgcccagggtcacacagctcaggaatctgaacctggctcaaaccagcattcacttctctcaaggcccacccaagggctgcagtgcagtggcacaatctcagctcactgcaacctctgccttccaggttaaagggattctcctgcctcagcctcccgagtagctgggattagaggtgcgtgccaccacacccggctaatttttgttattttaggagagacgaggtttccccatgttgttcaggctggtctcgaactcctgacgtcaagtgatccacctgcctcggcctcccaaagtgctgggattacaggcatgagccaccgcgcctggccaggaacagtctttactgacatgtgtttagggccatcgcacttcccccgctcttcacgggaattctctcttcactggctccactcaggtgccttttgtgagacagaaattcaagcgatgaggacagagatacaaacccgggatgggaggctgtgacatctgcccatagaaacacaattctgtttctaggaatttatccttcaactcgctagtacacgctcttcaagacatactgaaaaaacatgaaggattagaacagtgggtgtcgaatgctaccatttgtcttggaaatcaagcaaaacgaacgtgggtatggttgccgacgcatggaccatctccagtggaacaaggaactgccaacgttgattgcatttgggagggagatgaagggctgggatggaaagagctttattctcagtgcctcatcttttggttgttttggattttacaacatgtgcatgcattgcctacacaaacaaagacactaatttgaaaaggaaaaggggagaagaaaagagggaggaaagaaaaggggccggtgtggcagctcacacctgtcatcccagcaccttgggaggccaaggcggatggatcacctgagatcaggagtttgagaccagcctggccgacatatactgaaaccctgtctctactaaaaaatacaaaaattagctgggcatggtggcgcacgcctgtagtcccagctacttgggaagctgaggcaggagaattgcttgaatctgggaggtagaagttgcggtgagctgagatggcaccactgcactccagcctgggcaatagagcaagactccgtccctaaaaaaaaaaagaaaaaaaaaaagaaaagaaagaaaggaaagggagggaagagctcagtgtgggagaagattgggggtgggagtagagaattaatggaggaaaaagatgtgggggacaaaagcaaggtgtgagaggtgttggcaatggaaactgaatacctgttgagaagagccaggagggggcgacatggctttgaatctcttggggctgtgagattatgtgaaatgtgagaagactggacctcagtggggtgcctgacatatattcaggttacacctcccacaagcaggtggggctggacaatctctgtcaaccctccagccaggacccaagtgtctccctgtacattacttttggttgttgttgagacaagaatctcactctgctgcccaggctggagtgcagtggcatgatcttggctcactgcaatctctgcctcctgggttcaagtgattctcctacctcagcctcccaagtagctgagactataggcgcctgccaccacacctggcaaatttttgtatttttagtagagacaaggattcaccatgttggccaggctggtcttgaactcctgacctcaggtgatccacctgcttcagccacctaaagtgctggggttataggtgtgagccaccgtgcctcgccctccacatgcattttgagagccagctctctgggttgctttgtcccaactcacccagccttctttgaggcttccccaaaccctgggagcatttgacattgcagactgagctggacaatcaagggagaggtcttgctgacctgtcggggctggtggagtcatcagagattgtctttatcctcgccttcttcttctccacctcctcaacttcccctcttcttctggggcaatcctggagggcttcttgtaggaggcctctcccaccatctgcccagctctttctttctaatcttgttcaattgtgggtaaaggcacagctagttgggagcttggggagtttgatggggacaggggatgcagggagagggaggggcagggaatgctctcagggtccaaatttccttccattctagggttgcctgtgctcatctgtctgatggcttctctctctccctctcatccctgcctcctctttcctacctctcctcctccccttgtctctgtctctgacattgcttctatctttcttttttaacatctgtctcttttgctttttatctttgcctgtctctcctctgtgtctctctccttatgtctccatcttggtgtgtctctgaatctctccgtatctctgcctcctcctccccacatctctccccacctcccttccctatctctgtctctctccacagtcaaaaaagccaagtttgatggtgcccaaggtaagtggcttctcttgctgtcctgtcccgtgttgtctgtctgtctgtctgtctcttggagagactgggagggggtcccagcccagacttagagttgggctttatgtcttctgagcatcaggagaggggtcagaagattaaatagggggaggggcagccattggcctggggtccctgcagtttgtatgggggtccccgggtctccccagccatccttggagagtctgtaaggggtggggcttgccctgagccagtggctcttcccagggtcctaagaggtagaatggggactcttagatggggctacaggtgggaaaaatgaggctcagagaggcgaaaggagtttctttcttttcttcttcttcttttttttttttttttgagacagagtctccttctgttgcccaggctggagtgcagtggcgtgatctcggctcactgcaacctctgcctctgggttcaagcaattctcctgcctcagcctcccaagtagctgggattacaggcgccctctaccacgcccggctaatttttttatttttagtagagatggggtttcgccatgttggccaggctggtctcaaacttctgaccttaaatgatccgcccgcctcggcctcccaaagtgctaggattgcaggcgtgagctaccgtgccctgcctttttattattattatttttatttaaaatttttattttttgaggctggagtgccgtggtgcaatcatgttttactacagcctcaacctcccaggctcaagcaatcctcccacctcagccttccaagtagctgggaccacaggcgtgcaccactgcacccagctaattatttttttgtattttttagtagagatagggttttgccaagttgcccaggctggtcttgaactgctgggctcaagcaatcctccccccttgacctcccaaagtgctggcattataggcgcgagccactgcacccagcctgcaaagggggtttcttacagtcaattttgttccccttttctgggacctcagtctttttagctgaaaaccaatggcatggtcatttcgaagcagctggatgaagtatcccaaaattccacgtctccccacactgaggcccctcccttgtgccctgagggtggggttgtgggttagggggtgagtggcccagaaattcctgaggggatcacagcagatggtctagagcttgggaaggggcattggagagtccctgagccccagcgctgacccctactctcactgccacagagaaattcaacacgtacgtgaccctgaaagtgcagaatgtcaagagcacgaccatcgcggtgcggggcagccagcccagctgggagcaggatttcatgttgtgagtctgcagcgtctggcatgacctcactccctggcatagcccagcacctcgctggcccctcagggcagagctggacactggggaatcccgggtgactcccctctgtcctccctcttcccctgtccaccttatcaccttcacctccaaaacacatccccaatccaatcacttcccttggtctccgcagccaccagccaagtccctgctgcccgccagcctccgccctggcctcctgtgccatccacctcctacaatctgttctcctccaggcagccagggggatatttttaaaactgcaaatcacatcctgtcgctcccatgttccaaacttgtccgtggctcatcgacctcacaataaaacccacagccttccccgtgattcccaccaggttctcgctctatctccctcacctgccccagccacacccacctctgcccctttctccaacacttcccagcttgttcttgccccagggcccttgcacttgctctcctgtccccagctggctcttctccttcaggtctcagcttgtgtcacctcctcagtgaagccctccctgaccactacctccaagctacaatttcagggcatcatgccttcccaggccttgccaccaattttgtttgtttgtttgtttgttttgaggcagagcctcactctgttgcccaggctggagtacagtggcataatctcggctcacttcaacctccacctcccaggttcaagtgatcctcctgcctcagcctcccaactagctgggattacaagcgtgtgccaccacacccggctaatttttgtgttttaagtagagatggtgtttcactatggtggccaggctagtctcaaactcctggactcaggtgatccgcccacctcagcctcccaaggtgctgggattatagatgtgagccaccatgcctggccaatggaatttttttccttttttttttgttttgttttgagacagagcctcactctgtggcccaggctggagtgtagtggtgcaatctcggctcactgcaacctctgcctcctgggttcaagctattctcctgccttagcctcccgagtagctgggactacatgtgcgtgccaccatgcccggctaatttttgtgtatttagtaaagaccgggtttcaccatgttggccaggctggtcttgaacttttaacctcaggtgatccacccgcctcggcctcccaaagtgctgggattataggcatgagccaggagccaccaatcccagccaacagatatatatatcagatatatatatacttttttttttttttttgagactgagttttgcttttgttgcccaggctggagtgcaatggcgtgatctcggctcaccgcaacctccgcctcctgggttcaagcaattctcctgcctcagcctcccgagtagctggaattacagacatgcaccaccacgcccggctaattttgtatttttagtggagatggggtttctccatgttggtcaggctggtcttaaattcccaacctcaggtgatccgcccatctcggcctcccaaagtgctgggattacaggcgtgagccaccgtggttggccatattttaaaaatatatttcttaagataaatctttggtaaactgtaaattcagtgaatctcacatttcaccaagtttcctgctcccccgaattcacatatgtctagggcgaggcctgcagggaaagtgctttgaggtgggatcgtgtcctcacatcattagatggggatgacactgggaaggacagaggtgacccgaatgtccttatcctgtaggtaaagggagctatggagggtatttgagcctcttcctcacttacccagcatggtcagtgttggagggcccaaggaagggctcagaaagatgaaggtgcaggcgatgtgtaacatctgtccccacgccatccttcccggctttgaatcctggttcttttgtgataccccgagctcttaacttcccccactggcctcagtttcccctctataaaatgagaaccaccatgttaccctaccacctaggacactcccaggcctaggtttgaattgcagtatgctgtgtgttctcaggcgaatcaactaaactccctgggcccccgtttcctccctcctgctccctcgacgccccctctcctttttctgcagcgagattaaccgtctggatttgggactgacggtggaggtgtggaataagggtctcatctgggacacaatggtgggcactgtgtggatcccactgaggaccatccgccagtccaatgaggtgagtggcgggtggcctgagggtgaagaaggaggagtgccttgcagaagcccagagaccagtggactaaacaagatgggcatttatctcctatcccctgacaacatcaatgtagacacttgggattgccacgaaccttccaaagtcactagagcctatacaccttccatcttgctctgcctctctctccatgtggcttccaccttgtggccccaaatggctgctttaggctcaccattgcatcttcattccaaccaccgaaaggtgctggtggtgggggaggggggtggttcatgcacatctcattggccagaacttagacatgtggccaacaccttgctgcaagggattctgggaaatgtagtcctaggctggaaaatgtagtcctgggctgtgcttccctaggcacagctaaaaatgtattaccttggaaggagaaaagggataatataggcaattagcattttgtgtcccagatgggcagcagcaggaagcttacaccaactcataagaaggtgctaggtaacaaccctggcccctcagcctgtgcatcattgtcagcaggtagtagtgatgtctattttttatttaattatttatttttgagacagggtctcactctgttgcccaggctggagtgcattggcatgatcatggcccactgcagcctcgacttcccaggctcaagtgatcctcccacctcagcctcctgagtagctgggactgcaggtgcatgccaccaggccccccttattttttttgtatttttaatagagacagggttttgccatgttgcccaggctggtttcgaactcctgggctcaagcaatccacccacctcagcctcccaaagtgctggtattacaggtgcgagccaccatgccaggccgtggtcatgtctattcatctgtccccacagcccaatccctggcctcctaacctcaagtctcaacctctccatgctgaccccaggaaggccttattagctggagctctgatctgtcctcccctgtccatctgccttgggaggcccttcagatggcacctgcccactagcctcatctccccccacactctaacctctacccctcccagattccaccctctgaacctttgcatagtgtgttccctgagcttcaagtgtcctcctttccatcaccttctaaattcccatgtgcccacctccaggaagccctctctgacttctctctagatcctttagccctccttcctccctctgggctatgacctcatggggctgggggtgcctgtgtccagccctgtttccaagggctatgggctctcaggagccagggtgatgatggctgggcctcttggggaccctggcatcacccaatatgaaccaggcatagaggagggactggggactgttttttgtttgttcgtttttgtcattttattttattttattttattttattttattttattttattttattttattttactgtgagatggagtctcactctgtcacccaggctggagtgcaatggcacaatcttggctcactgcaacctctgcctccctggcttaagtgattctcctgcctcaacctcctgagtagctgggattacaggggcctgccaccacacccaactaatttttgcatttttagtagagatggggtttcgccatgttggccaggctggtcttgaactcctgacctcaagtgatccgcccaccttggcctcgcaaagtgctgggattacaggtgtgagtcaccgcacctggccagtgagtgtttgtttttgaatgaatgaatgcagagggacgaaatggttgcaacaatctaggtaagcgagtctaaaaggaagccttggctgggcatggtggctcacacctgtaatcccagcactttgggaggctgaggcaggtggattgcctgagctcagcagaccagcctgggcaacatggtgaaaccccgtctctactcaaaaatacaaaaaattagccaggagtgctggcacgtacctgtaatcccagcagctcaggaggctgagttaggagaatcacttgagcctgggaagcggaggttgcagtgagctgagatcacgccactgcactccagcctgggtgatagagagactctgtctcaaaaaaattaaattaggccgggcatggtggctcatgcctgtaatcccagcactttgggaggccgagatgggtggatcacgaggtcaggagattgagaccatcctggctaacacggtgaaaccccgtctctactaaatatacaaaaaatcagccaggcgtggtggcgggtgcctgtagtcccagctactcgggaagctgaggcaggagaatggcgtgaacccaggaggcagagcttgcagtgagccgagatcgcgccactgcactccagcctgggcgacagagcgagactctgtctcaaaaaaaaaaaaaaaagaaaagaaaagaaaaaagagagagaaaggaaggaaggaaaagaaaggaataaaggaaggaagggaggaagggaaagaaagaaaggaaggaagcagggagggagggagggaaggaaggaagggaaggaaggaaggacggaaggaaagatagagaggggacatgactttggttttggggtaggggtgagggggatgtctcatgcgagagtaggggccctggggactagtgaccagcagattcctgacccacacacctcctcccccaacccccaggagggccctggagagtggctgacgctggactcccaggtcatcatggcagacagtgagatctgtggcaccaaggaccccaccttccaccgcatcctcctggacacgcgctttgagctacccttaggtgagtacaggggcccgggaccttcacccagccccagccccagttgtggactcactcagctattccaggagagtgaacaggcctgggtaggtctagctgacccttcaggctgagaatgagggtccttcgccccggaggagagagagtttcttgggttgcagagaacagggatgtgaacctgctgggtgcgggccatgacctgggccccgtagcttcccagtgagctgcaagtgcttcacgaccgagggcgttcagggttgagctatcctggctgttccttggtgatgcctgagactgcaacagtgaactggggataggaggagagacagacagagacagagagacaaagagagacagagagagacatgtagacagaggctgagaacagatagtcccctcttcctttcctggaagcaccttgagtctctccacctcattcttctaagaacccatggctggccaggcatagcttctcatgtctgtaatcccagcactttgggaggccaaggggggaggatcatttgaggccaggagtttgagaccagcctgggccatctagtgagatcccatctctatgaaaaagttaaaaattcaccaggcatggtgctgggtttctgtagtcccaactatttgggaggctgaggcaagaggatggctcaagcccaggagtttgaggcttcagtgagttgtgattgtgccactgcactccagcctgggtgacagagcgagaccctgtctctaaaaaaataaaaataaaaacaatgggctgggcgtggtggctcatgcctataatcccagcactttgagaggccgaggcagatggatcacctgatgtcaggagtttgagagcagcctggccaacatggagaaaccctgtctctactcaaaatacaaaaaaattaactgggcatggtggtgcacacctgtaatcccagctactcgggaggctgaggcaggagaatcgcttgaacccaggaggtggaggttgcagtgaactgagattgtaccacttcactccagcctgggcaacagagtgagactccgtctcaaaaaacaatttaaaaattaaaaaattaaataaaaacaatggcttccccaccctcgtaaaggctaggaaccatctcctgtcatcctccaactattctccattcagctctgggaagaggggcgtcagaggcaccacggtacctccccttcatctccatccaccctcctgagaccgcagaccaacccacccctacttctgaggctttgccaaagaccccagaagccagggcccgggtggagctcagtaggcctggaggatggaggctgagcggcagggagggtcttccaggctcacagacagggctctgcttgcagacattcctgaagaggaggctcgctactgggccaagaagctggagcagctcaatgctatgcgggaccaggatgaagtgagtgttggggtgggaggggactgtttcttccttgtttctgtctctgtctccccatgattttcacttacagatgctgtttctctctaagcttgtctttccctgcatctctgtttctaactctttgtaacctgactgcatccatgacccatgtggtccagtctctagacaatgatggggtcaagaaacacacagaggccaggcgcagtggctcacgcctgtaatcccagcactttgagaggcgaaggtgggcagatcacctgaggtcaggagttcaagaccagcctggtcaacacagtgaaaccccgtctctactaaaaaaaaaaaaaaaaaaaaaaaattagccaggcttagtggctcacacctgtaatcccagcaatttgggaggctgtggcgggcagattatttgaggccaggagttcgagaccagcctggccaacacggtgaaaccccgtctctactaaaagtacaaaaaattagctaggcatggtggcgggcgcctgtcattccagctccttgggaggctgaggtgggagaatcacttgaatctgggaggcagaagttgcagtgagccgagatcacgctgctgcactccagcctgggcaacagagcaaggctctgtctcaaaataataatattgataataataataaaataaaaaattttacttttcatttggcggatacatgtgcaggtttgttacacgaatatattgcatgatgctaaggtctggaattccatggcattactcaaattgtaaacacagtacctaacgggtagttttttcactcttgtcctgctccctccttcctcccttctggagtccccaatgtctactgttcccatctttttttttttttcttttttgagacggagtctcgctgtgtcaccaggctggagtgcagtggcacgatcttggctcactgcaacctccacctcccgggttcaagtgattctcctgcctcggcctcccgggtaactgggactacaggcatgcgccaccatacctggctaatttttgtatttttagtagagacggggtttcaccgtttagctaggatggtctcgatctcttgacctcgtgatctgcccgcttcggcctcccaaagtgctgggattacaggtgtgagtcactgcacctggcccctagtcttttttctatctctgtttcttactttttctgtctctgtctctgtctctgtctttctctctctctctctctctctctctctctcgtgtgtgtgtgtgtctttctctccttttctctcttactccctgtatccttctcatagagagggagagaatttgggaggtagagggaagtcgggatgggacagaacagaggactatcctggtcccctggcctttggcccctctgagagaagccctttctccttcctccaccccttcagtattcgttccaagatgagcaagacaagcctctgcctgtccccagcaaccagtgctgtaagtacctcttgattcttccttgggtatcagctgaaatcctcatccctcccctaccccatgactgtcctgtctaaaggctcctccagtccggagatacaagtcctgagagtgcagtgtccacttacagtgtattagaaatcagcgttctgaggctgggcatggtggctcacccctgtaatcccagcactttgggaagccgaggtcaggagttcgagaccagcctggccaacagggcaaaaccccatctctactataaatacaaaaaaaatgaacaggcatggtggtgggtgcctgtaatcccagctactcagaaggctgaggcaggagaattgcttgaacccaggaggcagaatctgcagtgggccaagatcatgccactgtactccagcctgggtgacagagcaagactctgactcaaaaaaagaaggaaggaaagaaagagaaagaaagagagaaagagagagagagaaagaaagaaaggaaggaaggagaggagaggaaagaaagaaagaaaaagaaagaaaagaaaagagaaaagaaaagaaaggaagggaaggaaagaaaggaaaggaaggaaaggaaagagaagagttctgagacttgggcttgatgaaagacaagaaggaagaaaggaaggaaggaaggagagttctgagacttgggcttgattcccaccttgctatgtggtcatgggcaggccagtgtccctcttcgatatttaggggccctctctttgaaatagcgcatctgacagccccctcactctgagggctgttggaaggatctgggacatctagagacatgaaaaacacttcgtagatgcttcacttccattcatcagatcctggatgagggcgtataactcattccacaaactattcatggggccagcacaaaccccgagcagcccacgtcagatggtgcagacagacacaggcagaagatcctgccagcacatgtacaatgggcgcacgtacaacagacgaaggctgtttcactaacccattttcttagatggagaaactgaggcccaagaggagatgtgatttacccaaggccacacacccggcaactggcagagccaggatttgaacccaggtctgagggactccaactttgcttccctttccactgcaccttgtctgttaatgatgatgatgatcacgttcctcttcctatttccatcaaggctgcagttgtcaagattttttatcttcctgggccttgtggacactcagatgcatccagaccaggtcttttcatggatggaggagctgtctccctccttaaaatgacttcccattgctctgtggtggaggggaagtagcaaatcatatagcctcagggcagagctcccacctgctgacaccaaaaccccactgcactctttagcctccttctcctttcccatttactttcttttcttcttctctttttttttttcttggagatagagtctccctctgtcacccagactggactgcaatagtactatcttggctcactgcagcctctgcctcccggatttgagtgattcttgtgcctcagcctcttgagcagtggggattacaggcacatgccaccacgcccagctaatttttgtatttttagtagagatggggttttgccatgttggccaggctggtctcaaattttttacctcatgtgatctgcccacctcagcttcccaaagtgctgggattacaggtgtgagccaccatgcctggcaccttttccatttgcttttccatcttccttttctcccctctcacagctctccctgtatctgtgtctccctcaccatgtgtccaggagggtggtaatggaaccggggttgaggagggcttgggatactccagctggggtaccctgtttccacactaacttggggagtgatattgagaaagttccttggcttccctggccagggaggggtcatcactgcctggaaggaattacaaacccccgcttggtgaatggggtcattgagaggttgcaatgggggcggggccaggcagagtggaggcaggaaggcaatggcagagagcccctgggcagatggactagagctaggggcaggttcattttgggaagtggagaccaccactcagtatttacccacaagtcctcccttggagtattttgtcaccctatttctcagagaaagcagccaatggtcagaggagccaggattctggtccaggacatttttctgaagtgccaggtactgcacgtgataggcaaaggtggttctcgccctggccctgatgcgcagaggctctgtgactttgggctgctcactccatccctctgagccccatagtttcacccataaaatgagtagaatgataaaatccacccaacaggggtgtttcaaaccttagggtttccaatttagtgtgtctttccttatccaagagctgggagaggaaaagggtggagactgggagactgctaaccctagacatcatagtcagaaaaccctgggcccaaatacccactttgttacttcctgactgagcctttcctctcattgaaaactgagccaggcacagtggctcatgcctgtaaatcccagctactcggcctcacttgagaccacgtgtttgagaccagcctgaccaacatagcaagatccatctccacacaaaaaaacaaaaagaaaaccaccaagaaccaaaacattagctgaacatggtggtgtgtgcctgtaatctcagttactcaggaggctgaggtgggaggatcacttgagcttggaaattggaggctgcagtaagccgtgattgcaccactctactccaggctggatgacagagtgagaccgtgtttcaaaaaaaaaattaaagaaaagaaaaaaataaacaaacagggatatcccaccttcctcccaaggtggagagcagagacacagcaagtgtcagcaatgaaggtgatactcagggaaggtactcaggacaagagggacttttggggtggggggagcagttggggagagtgaggacagcaggggagcccccttcctacacccacccctctgtctgctcccttttattatttctgccccttctctttgtaggcaactggaattattttggctggggtgagcagcacagtaagtactcagcctgattgatgttctgggagttacatgggaaggtgggcaccttggtgatcccaaggcccctccccactaccacacagggaagcaaggagcctgtgacgagcacgtgggggccagagggctcagcaagacccctttcaagctttcctgtaccctgttcattagtgcctgtcttgggaggcctgccatctgctggggagtgggcaccgtcattggggtggggtggggggggttagcctggaggagtggacatttagaccaacaacctgcttgtctccagctgggcactgtgacccccgcaccccactccgccgtataacctcacctcctctcctgtagcccctgccttttggtcttcctatcttccttctccacttggaaatgtgtccagtgtcactcagagggtagtgggtgggcggggtctctaacagaacggcaggccagggacctcagggagatgcacacagggacctcagcaccccccaggtccacccacactcacacctcaccttccaccttcatttgctctcccagggaataaggcaagccaccccctccctaaattaaatgtccattttccttttcctttttttttttttttttgagacggagtctcactctatcacccaggctggagggcagtggcacgatctcagctcaccgcaagctctgcctccagggttcacgccattctcctgcctcagcctcccgagtagctgggactaaaggcgtccgccaacacgcccggctaattttttgtatttttagtagagacggggtttcaccgtgttagccaggagggtctcgatctcctgacctcgtgatccacctgccttggcctcccaaagtgctgggattacaggcatgagccatggcacctggccctaattaaatgtccgtttttctacctaacagcggttcccaacctttttgacacaagggaccagtttcatggaagacaatttttttatggactggggttgggggatggtttctggatgattcaagttcactgcatttgttgtgcactttatttttattattattattattacattatagtatgtaatgaaataatgatacaactcatcatcatgtagaagcagtgggagccctgaacttgttttcctgcaattagacagtcccatcttagggtgatgggggacagtgacagatcatcaggcattagattctcataaggagcacacaacctagatcccgcacatgcacagttcacagtagggttcacgctcccgtgagaatctttttttttttttgaaacagagtcttgctctgttgcccaggctggatggagtacagtggcgcaatctcgcctcactgcaacctctgcctccgagttcaagtgattctcgtacctgagcctcccaagtagctgggattacaggcgcgtgccaccatgcccagctaattttttgtatttttagtagagatggggtttcaccatgttggccaggctggttgtgaactcctgacttcaggtgatccacctgccttggcctcccaaagggctgggattacaagtttgagccactgcgcccggccttctatgagaatctaatgctgccgctgatctgacaggaggtggaactcaggcggtaatgtgagtgatggggagcaactgtaaatacagatgaaacttcactcgctcacccaaccgctgcccacctcctgctgtgcgccccagctcctaacaggccacagaccagatccatgccctaaagagttgctccctttctcccataccccgcctcttctagagaaatccagtcctctattctttctttccttctttcttttttcttttttttgagatggagtcttgctctgtcacccagactggagtatagtggtgcgatcactgctcactgcaacctccacctcccgggttcaagcagttctcttgcctcagcctcccgagtagttgggattacaggtgcacgccactatgcctggttaatttttgtatttttagtagagatggggtttcaccatgttggccaggctggtcttgaactcctgacctcaagcaatcctcccgccttggcctcccaaagtgctgggattataggtgtgagctaccatgcctggccagtcctctattttgaggataaatctgcctccttctctctccttcaactggggagtccttcactccttcctcatatcctggtggacaaacctaactccaggaccagtgaaactgttgacaaacactttggtccaccacaatttatcaaaaacaagttggttaaaaatcaacttaggccagccacactggctcacacctgtaattccaacactttgggaggctgaggcgggagggacgcttgagctccaaagtctgaaatcagcctgggcaacagagcaagactccatctctacaaaaaaaaaaaaaaagggccgggtgtggtggcacgcccctgtagtcccagctatttgggaggctgaggtgggagggttgtttgagcccaggaggttgggactgcagtgagccatgattgtgctactagactttagcctaggcaacagtgtgagaccctgtctctaaaaaataaatagattaaaataaataaataaaatcaattttgccaaaatgaatgcttggcagacagggcaagctcgataacaaccaacttgccacaaacgaacagtacggtcaaaagcaaagatagaccaggcgtggcagctcacaccataatcccagcactttgggaggccgaggtaggcagatcacttgaggtcaggagttcgagaccagcctggccaacgtgacgaaaccccatctctactaaaaatacaaaaattagccaggcatggtggtgcatgcctttaatcccagctactcgggaggctgaggcaggagaatcatttgaacctgggaggtggaggctgcagtgagccgagatcgtaccattgcactccagcctgggtgacagagcgagactctgtctcaaaaaaaaaaaaaacccaaaaaccaacaaacaaacaaaacaaaacaccaatgcagctaaagctgatagataattgggtcaaaaaggaaagacaattgaaccgaaaacagaccgttgggttaaaacaaaagtggttgaaaatagccagaagcaggcaatttagtcaagagctacttagtagaaagcagagcctgggcaaaagcaaaaagaatccaactcaaagtaatttacccttcataagcagataatttgtcaggaaaaaaaaaaactgggtaaacatgtgcacagcctcatgcaatttggctggaaacatctcagcccggtcaaggacaattggatagaaagaatgctggccggccgaggtggctcacggctaatcccagcactgtgggaagctgaggcgggaggatcgcttgagcccaggagttcaagatcagcctgggcaatatagggagatcccatctctacaaaataataaataaataaaattagctgggtgtggtggtgtgtgcctgtggtcccagctactgtggaggctgagatgcgaggatctcttgagcccaggaggtcgaggtttcagtgagttttgatcgcgccactgcgctccagcccaagtgagagagaccctgtctaaatgaatggatgaatacagcaaaagtctgaaggtttcactcattgctctgagattttggggtctgggggttttttcatttttttacatcctcttccccttacccgtacttctcatgttttcttcatggactactttttctttttttctggatacagggtctcattctgacacccagactgcagtgcagaggcgtaatcatagctcactgctacctcgacctcctgggctccagcaatgctcctgccataccctcccgaatagctgggactacaggcgcccaccaccacgcccagctaatttttaaatttttttaaagagatggggccttactatgttgcccaggctgatcttgaactcctgggctcaagtgatcctcctgccttggcctcccaaagtgctgggattacaggcatgagccactttgcctggcccatggactaggttttactttacttttattttattttattttttggagacagggtcttgtgtcacccagcccctggagtgcagaggtgtgatcttggctcacagcaatctccacctcctgggttccagagattctcctgcctcagcctcccaaggagctgggattacaggcacatgccaccacacctggctaatttttgtatttttagtagagacagggtcttggtatgttgcccaggctggtcttgaactcctggcctcaagtaatctgcccgcctccgcctcccaaagtgctgggattacaggtgtgagccactgtgcccggcctttgctttacttttaaaataaagataactttatcattctttttagttaaaaaattaaaaagattgcattattgaaatcttttttttcagaaggtacagaaaagaataaagaagaaaatgtacaatccccaattatgccaccacccagacatgttgcttttagaattggaatttttttttttaggatttagaaaacaaactgttcttttttctaaggaaaccaaactaaaccaaaatatcttttagttcttattaaacatgaagtttggcaactctaccacattccattttagcaatagattccaagtgtgtggtggctttgccaagctaagaatctaatcctttttgaaaaagacagaaccatgtctcagcatcttcttggttcttgcatatttgttaagttcaggtctggggtcgtcaccctcagatatcaggaaatctctaagggttaaagagcgttccgtccactttgaactcctgatcttcttccaacttccccctgactgtctgtgtgactcctgttatgggaaactaactgctcagtggaaaaaaatcccatgtcattttcagagatcctgaccttcagcaaagttgttcttcacatttgagctgaaggatgccctctactctgtccctgttttcttcacattgtaggtcctaccctagcccctagactttaggtccaatttgacccacataaagcaaagcagggttttcacctcccttgttctgaagcctatatctctattaacatgacccacaattctttatccatactagtaaaaaattctcttcttcggtagcggcaccgtaagtctgggaaattgtattggctcccatcatgtgcactctctcttcctcaccctcttcccataccgcctctctcttccagacgatgaccccgacagtgcagtggatgatcgtgacagtgactaccgcagtgaaacgagcaacagcatcccgccgccctattatactacgtcacaacccaacgcctcagtccaccaatattctgttcgcccaccacccctgggctcccgggagtcctacagtgactccatgcacagttacgaggagttctctgagccacaagccctcaggtaggtgctgcggagtgcagcatgcatgtgggtcctgctgtgtctcctggagtggagagaggggtacggggctggacagagctggaggtggagttccagaagggcagaattcacccatccaggagggcagaattcacattttcttgtgggaattaaccatttttttctttttttttttcttttcttttttttttagacagagtcttgctctgtcacccaggctggagtgcagtggcaccatttcggctcactgcaacctccaccacccagactcaagcgattctcctgcctcagcctccccagtagctgggactacaggcacaggccgccacaccaagctaatttatttttattttttgtggagatgggggtcttgctccattgcctgggctagtcttgaacccctttttattcctatagcatcctcgaggctggccagggaagagggtctcaggcgctaagattggaggaggtatctaatcgggaaatgataaggttcgttgaatgactaagtgaatggttagaagagggctgagtggtggcccctatgtccccctgcctgtatttagacagagacagatattgctgttgacgttgagcacgatcctgggttcacataagcagcacataacagagggcctgacctggccagacagtggggggcatttgcacaagtaagtgatgtttcagtgggtaccagagggtgggtaggagtttgctagataaagcagacaaggaagagaccacggcaagtgcacaggtttatggtgttggagagacaacgaggtggccagcgtggccggaatggaggaggcggggagaagtggagggaggtatgcagggggagtttggagcgtatgggccacacagggctagcacagattttattccaaggcactagggagccatggtaggatttagagcaggggagggaggtgattggatttacaattccctgtggcttccaagggaagcaggaactgtggagacagcatctggtagagacagcagaggctggcctgggttggggcccggggtacggggaagtggatgcatttcccatactttttccaggtggaggacaggagacctgctgcggggctgtggtgatggcgctgaccctgagttcccagcacagtcaattgcctgttccccacagaccgcaaatgccacaaaagtgggaatttttttttttttttttttttttttgagacggaatttcgctcttgttgcccaggctggagtgcaatggcatgatcccagctcactgcaacctccacctcccgggttcaagtgattcttctacctcagcctcccgagtagctgggattacaggcatacgccaccatgcgcagctaatttttgtatttttggtagagacagggtttcaccatgttggccaggctggtcttgaactcctgacctcaggtgatctgcccacctcagcctcccaaagtgctgggattacaggcgtgagccaccgcacctggccaaaagcggggatttttgtcttttctgatcatggctgtgttttccagcccctagagcaggacctggcacatcgtaggtgctcagtcggtgatgagtcaatgcctgtgtgactggggctcaggtgggcagtgactcggtaccccagtccctgaaccctgttccatccccacagccccacgggtagcagccgctatgcctcttccggggagctgagccagggaagctctcagctgagcgaggacttcgaccctgacgagcacagcctgcagggctccgacatggaggatgagcgggaccgggactcctaccactcctgccacagctcggtcagctaccacaaagactcgcctcgctgggaccaggatgaggaagagctggaggaggacctggaggacttcctggaggaggaggagctgcctgaagatgaggaggagctggaggaggaggaggaggaggtgcctgacgatttgggcagctatgcccagcgtgaagacgtagctgtggctgagcccaaagacttcaaacgcatcagcctcccgccagctgccccagggaaggaggacaaggccccagtggcacccaccgaggcccccgacatggccaaggtggcccccaagccagccacgcccgacaaggtgcctgcagctgagcagatccctgaggctgagccacccaaggacgaggagaggtaacaggacggggccaaggggccagaggggctgccacaaggtcacagggtcagcagggctatgatggggtcagcgtggacctgggaagttgctggggctgaagttgtcacaggctcttgggtttcttaaagggatcagaggtgacagggcagagtagggaggtcaaagagggttcaaggggccgtgaaggagacttagagtttgtgatcttagtggttgctggggtcggagaggtcaagatcctgggcaaatggggggccagaggggctgggctggtgaaaaggaagccgaggaacagtgaagtgtcacagaagcattgggtgtgtgggaaggggtgaggggcactgaggtgggccaggggactcacgtgggtcctaatgtctctgaggggtcagagataccatggggagctatgcatcacttgcacagctggagggtcaagggaagttcaggggtcacggagagccagcccagagcctcatagcgttccctgcctcagtttcaggccgagagaggatgaggaaggccaggaggggcaggactccatgtccagggccaaggccaactggctgcgtgccttcaacaaggtgcggatgcagctgcaggaggtgagtgacacgcccagccatgcccctgccacacttagccaggccacgcccaatggcaggcccacacatgttttggccacacccacacctatattggccacgcccaacaccccacccgtacccaagcctagcctgggcatgcccagtgcagtgcccacactgtgcccatgccccagccactcgagcccttccctggccccaccctcattcagcctggcctcacccaatgtcaccgatgccccacccactctgacccttccttagccacatacacacacagcccagggtatccccatggcccgtccacaccagcctggctatgctaactcccaaaccatgcaccaagtctggccccacacatccccagcccagcctccttcccaatgtcagcctggggtttctagatctagagggaggagagaaaactagggctgaaactgggctgaagtcatggttagggatcaaggtcagggttagttcagccatcaaagatcagaggtcagggttagaattggtgttaggcaaaggggtcagtgcttagggccaaattggaggtcattgtcagggttagggaaaggtctggggccggctcagtaggggagtaggaatcaagggaagcaatcagcatcaggggcaagctgactgtttagatgggcagcagggttgaggccattcgtttattccttcattcagctcaccctgggctggggacagctgtgttgctcttcagagttaccctccaaactgcagtgggattggcaggaggagattctaaacagactcccaaaggtttagaccatcaaatatcagagccacaaaattaccaaacgaaatttcttaacagttttaaaatagaaatctattttttgactcagcagtacatacatatggttctaaatgagacaggtggaagaggacacagtgaaaaggctgttggataacttccactaggtcaagaaattaaattgaaaaaatagcagctactattggaactatgtgatatacaagaaaaacaaactatggaactagtaatatgacaagaaaaagacacatggaaggctctctgggtttcataggaaaagcataaaactaatccaaggcaatcaggaaaactccctggaggagatgacacttaaggagaagtgatggccgggcgtggttgctcaagcctgtaatcccagcactttgggaggccgaggtgggtggatcacgaggtcaggagatcgagaccatcctggctaacatggtgaaaccccgtctctagtgaaagtacaaaaaaattagccggctgtggttgcaggcgcctgtagtcccagctactcgggaggctgaggcaggagaatggcgtgaacccgggaagcggagctggcagtgagccgagatcgcgccactgcacaccagcctgggtgacagagcgagactccatttcaaaaaaaaaaaaaaaaaaaaaaagagaagtgatatccaaaatatttatttcaacaatatttcaggagctcatgcctgtaatcccagcaatttgggaggtcgaggcgggaggctcacttgcactcaggagtttgagaccagcctgggcaacgtagtgagacctcatctctaaaagaaaaaaataaaaaatatttcagagccggatgcagtggctcacgcctgtaatcccagcactttgggaggcagaggtgggtggatcacctgaggtcaggagttcgagaccagcctggccaacatagtgaaaccccacctctactaaaaatacaaaaaattaattgggtgtggtggtgggcacctgtaatcccagctactaggaaggctgaggcaggagaatcgcttgaacccaggaggtggaggttgcagtgagctgagattgcgccactgcactccagcctgggcaacaaaagggaaactccgtctcaaacaaacaaacaaacaaaatatatatatatatatttatttcaggagctgagtgtggtggcttgtgtgtgtggtcccagctactcaggaggctgaagcaggaagatcacatgaggccaggagttcaagaccagtctgggcaatatagcaagaccctgtctttaaaaaaaaaccaaacaccccctcaatatttcagaacagaagagtgctgcctgtgttcctcatagggccacccctccccccatgttaaccctttagttacaagatggagggaaggtaggggctgtggaccccacgtctatgctgagacccgaatgataaatagaggctggttggctgcagaaggtgggaagaggtacaagctgaagtcacaactcctggaaagagcccgaggcaagagagcagatgaacaagtgagactatagggggtttagggaataatcaatgaagagactgaggtccattgaggtggttgaaagagaagagcttctttctcccccagcccatcttacagatggacaaactaaggcccagagatagccacggagcttcctaaaatcactcagccaggactaggacccaggccatctgactcccagcccagaggggagtcagaagtgggtgtggagcctgctctggggaggggagggacagccacactgaccatatctgtctgtctgtcctgcaggcccggggagaaggagagatgtctaaatccctatggttcaaaggcgggtaagtaatgaaactgtgagcggtgggaggaagatttgaaccccaagtccaaggctggtttgcgcctgagcctcagcccagagaggaggaggaggggttccatttagacaggggacagattgagcttgggcaaaatacgtcactttcataaggcacacagccatacgcagacacaaaagacagtaatctttgaagacagggcggggtgcggtggctcatgcctgtaatcctagcactttgggaggccgaggcgggaggatcatttgaggtcaggagttcgaaaccagcctggccaacatggtgaaaccctgtctctactaaaaacacaaaaattagctgggcatgctggcaggcgcctgtaatcccagctacttgggatgctgaggcaagataattacttgaacccgagaggcagaggttgtagtgagctgagattgcaccactgcactccagcctgggagacagagcgggacactgtctcaaaaataaacaaacaaataaataaataaataaatgtaagataaagcagacactatgaggaactagacactattgggaaatgtacactatatatttgtaatcctggagcaaaatttttgcgttgattctatttttaaatctctttgattattgctacagttgtgggctctttaattaaagatagttgtttagtcttcagtggagaatgtggtcatgtctaacctcttatgttatggattttcaggttagaggatgcacaagatattttaaaaatatgctcaggttttaaaatagcagcacgatagtgaccttccttgtacgtccttggcaaacaggcagggagacagcagctgggactcctaaataaatgagcaggtaccctagctagagagccttggatgcgggtcctgaaatgcggattcctgtgcacgtgatttatgaaggatgtgctctcgggagaaacctgtcagacaaggggaggctgccgagaaaagatgtggtttaggagtctctaagcctcagttggctcctgcagaaagctttgtaggttgaatagccctgcagggcttgtctggagtcattggctgcaggcacctatctcactggccagtgaaaaccttttcggggccaggcttggtggctcacgcctgtaatcccaacactttgggaggctgaagcaggtggatcgcctgacgtcaggagttcaagaccagcctggccaacatggcaaaatcccgtctctactaaaatatacaaaaaattagccaggtgtggtggtgcatgcttgtaatcccagctatttgggaggctgaggcaggagaatcacttgaggctaggagttcaagaccagcctgggcaacatagcgagacccccatctctacaaaagaatttttttttaattagctatgtgtgggccgggtgcagtggctcatgcctgtaatcccagcactttgggaggcctaggcggttgatcacctgaggtcaggagtctgagaccagcctggtcaacatggtgaaaccccatatctacgaaaaatacagaaaattagccaggtgtcgtggtgcgcacctgtaatcccagctacttgggaggctgagataggagaattgcttgaacccaggaggcagaggttgcagtgagccaagatcataccattgcattccagcctgggcgacagagcgagactccatctcaaaaaaaaaaaaaaaaaaaaaatttgctgggtgtggcggtgtacacctatggtcccagctactcaggaggctaaggtgggaggattgctgtagcccaggaggtggaggctacagtgagccgtgattgtgccactgcactccagcctgggtgacagagtgagatcttgtttcgaaagatggctgggcatggtggctcacgcctgtaatctcagcactttgggaggccaaggtgggcggatcgcctgaggtcaggagttcgagaccagcctggccaacatggtgaaagcttgtttctactaaaaatacaaaaattagccaggcgttgtggtgggcacctgtaatcccagctacttggggagctgaggcaggagaattgcttaaacctgggaggcagaggttgcaatgagccaagaaaggtttcatctatattttattttatttttgatacagagtctcgctctgtcacccaggctggattgcagtggcgtgatctcgactcactgcaacctctgcctcctggttcaagcaattatcctgcttcaacctcctgagtagctgggactacaggcatgcactaccatgcctggctaatttttgtatttttagtagagacggggtttcaccatgttggtcaggctggtctcgaactcctaacctcaggtgatccgcccgcctcggcctcccaaagtgttgggattattacaggcgtaagccaccactcctggcctcatttatattttagtatattatttagatttgccttaattcacgttttcattcaaggtgggcaattacatcatctccccatttttcagatgaggagggtgaggccgggtgtctccatttcttaggactgctgtcacaaagtaccacagacgggtagcttaaaaccacagcaatgtattctctcacagttctggaggccagaagtctgaaatcaaggcattggtagagccatgctccctctgaaatctgtagaagagaattcctcccctgcctcttctagcttctagtttgcttgaattccttggcccccgagtattggtttgtagatacgtcgctttctgcctctgctgtcacagagccaccttctccccatgtatctcttcttctaaggacaccagtcatattagattaagtgtctaccctactccagtatgaccttatcttaactaattacatctgtgacaaccccgtttccaagtaaggtcaccttctgaggtagtgggggttagggcatcagcgtatcttttttttgagggacccaattcaaccccttaacacctgggggaggttgaatgttctccccagggctctatgtgaggaatagggacatctgggccctcagtgtccctctgtgtctttcagcccagggggcggtctcatcatcatcgacagcatgccagacatccgcaagaggaaacctatcccactcgtgagcgacttggtaagcaccctcgccctttactccctgagcagagcaggcctgctataagcagtgcacaacctgtggaactgcccatggtcaacctggggttgggggccagctaggcattctctgagactaatgtagtctgatttctacccccatgtgctgcgtggacacttcaggccatggtgagtgatggcgacatgggcctcttgggatcttctccccaaactcccccactgggatcttctaacaggcccccaattcatggattatgggggaaccttgccatgtcccactgtgttggatgctgtgagtcaggggtgcggggctgctcactttccagggtcccttctaactcaaagcctctgtcacctcctaattctttgttgggtctggcccggatgctgtcggtgacctgtttccaacttgcggttgtggctccaaaatgtggctgctggccccatccgtggctgtgaactctcctggtggtgatctcatggatgtcaacccccccgactccctcttctgtgacctccccagtccctggtccagtccaggaaagcgggcatcacctcggccttggcctccagcacgttgaacaacgaggagctggtgcgtggggcacctctttttccccgggtcagggatggactgggctaggagcttctggaattgtccaagcctctgtgggtccccgggaagaggaagggtgtgtgtgtgacacagactggcagaaggcagcgtggattccgacagcgtggaggcaggggagggcctgggactttaccgcgctcagtgatggggcggaatggggcaggacagggacagcgccaggttaggcgcccccaaaccgcaccccatccctccctgcagaaaaaccacgtttacaagaagaccctgcaagccttaatctaccccatctcgtgcacgacgccacacaacttcgaagtgtggacggccaccacgcccacctactgctacgagtgcgaggggctgctgtggggcatcgcgaggcagggcatgcgctgcaccgagtgcggtgtcaagtgccacgagaagtgccaggacctgctcaacgccgactgcctgcagcgtgagcgcagggcctgagcgcagggccacgggttggcgtggggagccccggggcttgcatggcggggaaaggctgaagggcaaggcgatgggtggggcaccatggggcggggcaaggggcggggcgtcgtgaggcaggggagggactcgctgaaagggaggggtggggttaaaggcgcaggactccctggtggaagggctagggggtcgaggggtggggaaagaagctgtgagggtgtcagagaggggtggggcagggctcagggactagctaggttgtgcaaaggacaggcttagtgagaagaggcagctcccctggataaaatgggttagctaggggtagctctgagaggaagaggggctcagagagggaaggggttcagactgcgagaggactgtggagggggggattggaagggggaggggactcagaggaggtgggaccaagagaaagggaggggtctgagagatggaaggggctcaggaatgtggaggggactcgcaggggtggagatcagagacgaggaggggattcagaggagtggggctcagagaggcagcgggactcagaggggtgggactcagagagggggcggagattcagaggggtgggacgcagagggggcggggactcagaggggtggggcttagggaagaggccttagaggggtggggctccaaaaaccagtggggactccaaggggtgcggggcagagaagggcaggacgcagggacatggcgactcagaggagcatggctccgagaggaggtggaagggtgaagggtctgggtggggggtacagaaagcaggtaggaaaccggcttcagggggtgacacctgagtccccccggttgatgagtaggggcggggctctcgccttggtgaggggccactatgcagggcgcgctggggtcagcgccggcctcgggcgtcctcaggggctgcggagaagagctccaagcacggggcggaggaccggacacagaacatcatcatggtgctcaaggaccgcatgaagatccgggagcgcaacaagcccgagatcttcgagctcatccaggagatcttcgcggtgaccaagacggcgcacacgcagcagatgaaggcggtcaagcagagcgtgctggacggcacgtccaagtggtccgccaagatcagcatcaccggtgagggggcgtgggccgccatagggcccctccttctccaccctctgagacctgtctcatgccctgtcccatggcctggtccctctcctttgcagcgcgcactcactcggtcgggtgcattccatctcatctccgtgtgtgcacgcatatggggggacatgcgtgcctccaaacgcctgttcatggcactgtatctgggtgcgtcttggatggtgccctccagaatgagactccaagaagaggaattgagggtgcatggtttatctggaaagtgaccccagaaagtcctggtgaggggcaaggacttgagacagggatggaaggagtcctgaaggagatgccgttgagcagacaatgctgtgggcaagggggtcagcccatcctggggccactggggacaatgtcgagcatgcagctcagtgtggccccacttaggggcgaggatactggcttttctccacacccagcctcatgtgggtttccccataaacagacctgaggatgaggatttcaggttatgtgggttatccaggaagtgaccccaggacggagctggggtggtaagtcagggagggaaggaaccctgcagggggcaccaacgagcaggagatctcggggggcaatgggttcttgtaagtgtctgacctcagggagttcacacctgagagaggtcctacccatgcgcaaggcagctggggcaccttcccatccttcatggtttggggactccttcccagcactttgggaggctgaggctgaggcaggcggatcacctgaggtcaggaattcgagaccgacctggccaacatggtgaaaccccatctctactaaaaatgcaaaacgattggccggatggggtggcacgtgcgggtaatcccagctacttgggaggctgaggcaggagaattgcttgaacccgggaggcggaggttgcactccagcctgggtgacgagcaaaactctgtctcaaaaacaaacaaacaaacaaacaaacacacaaaaaacctctctggcaagcccagcgtgccctgccattgctctccagccatgctgcaggtgtcccaattatcagcctgcagcgtgtggcagtgactgtccccagcatgcctcgcttcttgagtgcacacctgtgtatgccctctgtgtcttccagtggtctgcgcccagggcttgcaggcaaaggacaagacaggatccagtgacccctatgtcaccgtccaggtcgggaagaccaagaaacggacaaaaaccatctatgggaacctcaacccggtgtgggaggagaatttccacttgtaagtgcctggctgggtccctggccccatgtggggcatcctgctggggcagccaaaagagggctccaaggacaggactcacactggctgcctgacccctgcctctgcctcctcctcccgccacagtgaatgtcacaattcctccgaccgcatcaaggtgcgcgtctgggacgaggatgacgacatcaaatcccgcgtgaaacagaggttcaagagggaatctgacgatttcctggggcagacgatcattgaggtgcggacgctcagcggcgagatggacgtgtggtacaacctgggtgagagaagctgggttctgaagcgggtggggacgggtcccagggatccagccagagcatggagcccacgaagagcagagagatgtgttctcaggaggagtttggtcgaggagcataatctgatgggggaggcagggtctaggagcccagtttgatgggagcaggaagcacccaggccaggagggtgagcagagcccaggaacctcttagttcagcttaggagggagggtggggacagaatctccatgttctagtctaatgggggaggcaagaagcaagaactgggaatcctagtctgaggggagagacagagacctaggaactaaatctaagaaagaagattgagctttaagaatccaggctggggccaggtatggtggctcacgcctgtaatcccagcactttgggaagctgaggcaggcagatcacatgaggtcaggagttcgagaccagcctggctaacatggtgaaaccccgtctccactaaaaatacaaaaattagccaggcgtggtggtgggtgcctgtagtcccagctacttgggaggctgaggcaggagaatcgcttgaacccaggaagcggaggttgcagtgagctgagactgcgccactgcactccagcctaggcaacgagagcaaaactcccactcaaaaaaaaaaaaaaaagaatccaggctgggggcgccgggcagtggctcacatctgtaattaatcctatcactatgggaggctgaggcaggccaatcacttgagtccaggagttcaagaccagcctgggcaacatagtgaaaccccatctctataaaagatacaaaaattagctaggcagggtgacactcacctgtggtcccacctactctggaggctaaggtgggaggatcccctgagcctgagaggtaaaggctgcagtgagctgtgatcacactgctgcactccagcccagggaacagagtgagaccctttctcaaaaaacaaatatggccgggtgcagtgtctcacgcctataatcccaacagtttgggacggctgaggcaggcagatcacttgaggtcaggagtttgagaccagattgtccaacatggcgagatcaagcccctgcactccagcctgggcaacaaaggaagactccgtctcaaaaaaaaaaaaaaaaaacaaaagaaaaagaaaaaaaaaatggaatccaggctgggcatggtggctcccacctgttatcccaacatattggttgggtggctgagctgggagggtcacttgagcccaggagttcgagaccagcctgggcaacataacaaggcctttgtctccattaaaaaaaaaaaaatagctgggtgtggtgatgcgtgcctgtagtcccagccacttgggaggctgaggtggaagcatcatttgtacctgggaggttgaagctgcagtgagctatgatcatgccactgcactccagcctgggcgatagagcaagactctgtgtccccccgaccccccaccacaagaaaagaatccagtctaaagagggaggtattgtttgggaatcctaatctgagatggctgctacagatcaaagaaccctgtgtaaggaagttgagtagaatctggggagtccaatctaatggaggaagcagggtgtatgagcctaatctgagggggtagaaaggacccagcctgagagaggtgagcagagcccggaaacctcttagattggaggacatctagatatcccattctgatgggggaggtgggagacaagaccagggggtcctagtctgaggagagaggcacagacccaggaacagtgtctaagatgtgtagtctccggggagcatgatctgatgggggaggcagggcctgggagctcagactgggaaagaagtggggcctagggctgctagtctaaggagggaggcacatagccaggaacttaatctgagtgaagaagcaaggtctgggatccttgtttgaaggaagagacagggcttaaggaattctagcctaaacagggagactcaagcctagggagccaatcagaagagagacaccaaagccttagtttccggaagtctgggaggactacagaatcgtgtatctattaaaaattgccttgggaggccgaggcgggcggatcacctgaggtcaggagttcgagaccagcctggccaacatggtgaaacctcgtctctactaaaaataaaaaattaggtgggtgtgatggcacatgcctgtaatcccagctactcgggaggctgaggcaagacaattgcttgaactcaggaggtggagattgcagtgagccaagattgcgccaccgcactctaacctggaccacagatctcaaaaaaaaataaaataaaaaaaaatttgcccatggctggccgggcgcggtgactcacgcctgtaattccagcactttgggaggctgaggtaggtggatcacctgaggtaaggagttcgagaccagcctggccaacatggtgaaaccccgtctctactaaaagtataaaaattagctgggcacggtggcaggcacctgtaattccagctagttgggaggctgagacaggagaatcgcttgaacccaggaggtggaggttgcagtgagctgagatcgtgccactgcactccagcctgggtgacaagagcaagactccctcttaaaaaaaaaaaaattgcccactgctatagtgggaagttctgacactgtcttctttttctgccctgcagacaagcgaactgacaaatctgccgtgtcgggtgccatccggctccacatcagtgtggagatcaaaggcgaggagaaggtggccccgtaccatgtccagtacacctgtctgcatgaggtgagggtcattgctcggcccctcccatgccacttccactcaccattcctgcctgcccagctcttcctctttctggccacaccatccacactctcctggccctctgagactgcccgccatgccattccctttacctggaaaactcctccctatccatcaaagtccagattcagggtcacctcctctgggaagcccaccttggcctccaggttgactctcactactcatcatcaggttcttccttctattccagccctaaccactcaggattgggccgtttgtgtctgggtatgtctcttccagctgcctgggtttcctggaaagaactcttatccccaggaactagtttgttgaataaatgctggtgaatgaatgaatgattgaacagatgaatgagtgatgagtagataaaaggatggatggagagatgggtgagtacatggatggatagatggatgagttggtgggtagattcgtggctagatggatgatggatggatggacagatggatggatatatgattgaactattgaaagtatagatgtatggatgggtgaatttgggggtaattgttagatgatggatgagtatagatgaatgatggatggataacttgatgagtggatagatagattgctggatagatgattgactgggtggatagatgaaatgttggatgagcagattaagttgtattggatgggatggatggaagtgtggttgagttattagaaggaagattgagtagataggtgaatttgttgatagtcagatgggtagataggtagatggatggatggatggatggatgtataggcagatggacaaatggatgaatgggtgggtggatgaatggaaggatgtgtggttgaactattgcaagtattgataattgggttcataatttctgaatatttagatggatggttgtgagtggctggtggacagacgaaaaatggatggttggataaattgatgggtggatggatggttggttgtatgaaagaatgaatgattgggtaggtggattaagttgcggatcaatgtatgggatggatgaatggatggatggatggatgtgtggttgaattactgaaaggttggaagagtggatgggtgaaatttggggtagttagatgggtgggtgtgtggatggataaaagagtagatgaatgaattaatgaataaacaggcagatggatgatgtaagctgccccagaccctgggacctctgacccccggcgaccccttgcactctccatgacactttctctcccatggtggcagaacctgttccacttcgtgaccgacgtgcagaacaatggggtcgtgaagatcccagatgccaagggtgacgatgcctggaaggtttactacgatgagacagcccaggagattgtggacgagtttgccatgcgctacggcgtcgagtccatctaccaagccatgacgtgagactgcaggctggggtgcaggaaacaagagggaggtcaccaagtgggcactggcaggtctggggtgggagggattctcagggggaagacccagagaggaagtgggcgtggtggtggtgggttccgtaattcccctggagatcaggagagcgctgtgattgacacctggagtgacatggaagagagggaagacttagaagcagagatagaggctgggcacagtggctcaagcctgtaatcccagcattttaggaggctgaggtgggcggatcactccaggtccaggagtacaagaccagcctggccaacatggtgaaaccccatctctactaaaaatacaaaagttatccaggtgtggtggcttgggcctgtaatcccagctactcgggaagttagggtgggagaattgcttgaacctggggggcaggggttgcagtgagccgagattgcgccactaaactccagcctgggtgacagagtgagactccatctcaaaaaaaaaaaaaaaagaaagaaagaaaaaaagaagcagaattagagcaactcaaatggatataaagatggaggggagaggagatgcggagacccaaaggacagaatcaggcaggggatggtttaggaggtgacagagacccactcacagatgctatcttggaggcattctaggggggatcttggtccatcctggctggacccctggcctagtgcctcctgctccctctctccagccactttgcctgcctctcctccaagtatatgtgcccaggggtgcctgccgtcatgagcaccctgctcgccaacatcaatgcctactacgcacacaccaccgcctccaccaacgtgtctgcctccgaccgcttcgccgcctccaactttggggtcagtcctggggactgggattggagaattagggagagcccaactttatgccggtcagatctgatgtgacttctgggtccccagtctagacctgattgctgtgtgactttccaccagtcacttcccgtctctgagcctccatttattcctctgtagaatgctatagaatggaggtcgggcgcagtggctcatgcctgtaatcccagcactttgggaggccgaggctggagaatcacttgaggccaggagttcgagaccagcctggccaacacggtgaaaacccgtctcttctaaaaatccaaaagaaaattagctgggtgtggtggcctgtgcctgtagtcccagccacttgggaggctgaggcaggagaattgcttgagcctaggagtcggaggttgcagtgagctgagactgcgccactacactccagcctgggcaacagagcaagactctgtctcaaaacaaaaaaaaaaatgccatagaatggaaatggacattatgagggtggtggatgaggtatacttactgtacagtaggcgctcagccactatggcggccatgtcctgcctccatccatcctccctcctccccttcctcctcagaaagagcgcttcgtgaaactcctggaccagctgcataactccctgcggattgacctctccatgtaccgggtaggaagtgtgtgcatgagaatttgctcaccccacgcacatgtgtgtgcctggaggggaaagctaccagcaggtgtgtgcatgggaggacccatcttcgcatgtacgatgtgttcctccagcatgtgtgcacctgcatgggcactacctgccgtaatgtgcttggtgcatccaagcagatccccagttgcttcgaggtgctctaatcaacccccagcctgaaaccggggagcctttgtatccccctgaaaagcagtctcccatcctccccacgccttcttccataaccccacatctcttcctgctcccaacagaataacttcccagccagcagcccggagagactccaggacctcaaatccactgtggaccttctcaccagcatcaccttctttcggatgaaggtaggaaaggatccagttgcctttgctctccaaggagggttctctaggatccccagctcccaggacaagtgacattcctcctggagagtggcagcctttctcagtaaccttttcctttcataccacttcatttccttaaacccaaaatgactcgcagtcacttcctggggacctcctgtcacagctgtggccgcctatgcctctctccctcccttcaggtacaagaactccagagcccgccccgagccagccaggtggtaaaggactgtgtgaaagcctgccttaattctacctacgagtacatcttcaataactgccatgaactgtacagccgggagtaccagacagacccggtgagactccagatgggtcagaagggaacagtgatgccaactagacacaggcttcagtcccagccctgccccttcccgagggatttaactcttctgaacctcagtatcttcttctataaaatggggtcattaacccacatctcaggattagggagaagagttcatgagctgtaagtttagataaaatatagtcggcactcagtacatttggttgcgtagttgagtttggcataaaaaaaaattttttttttttgagataaagtttcactcttgcttcccaggctggagtgcagtggtgtgatctcagctcactgcaacctctgcctcccaggtttaaatgattctcctgcctcagactcccgagtagctgggattacaggtgcccaccaccacacctagttaattttttgtatttttagtaaaaacggggtttcaccatgttggccaggctggtctcgaactccttgacctcaggtgatccacctgcctcggcctcccaaagtactgagattataggcgtgagccaccactcccagcctggcataaaaatttatgtctggcatacagtcactgttcagtaaatgttgagttgaattgaatttatttatttattttgagatggggtcttgctctgttgcccaggctggagtgcagtgatgcaatcatggctcactgcagcctcgacctcccaggctcaagtgatcctcccacctcagcctcccaagtagctgggactataggcacgcaccaccatgacaggctagtttttgtatttttgtggagatggcatctcactatgttgcccaggctgatctcctgggctcaagcgatcctcctgcctcagcctcccaaagtgctgggattacaggcatgagccaccacctgtaaggagcttatagcctattatgagggaaagatgtacaaactggaaatttacaaacagggatggttagtattgagatagtgggatctcaggaggctgtgggagctggaggcagcccctacccaggttctgataggatataacacataagctgtgttcagttcaatttgatttcattctgttcctttacattcagttgactagagttggaatcagtctcactctcatttgaattgagttgaggtgaactggattaaattaggctataaggagcttatagcctattatgagggaaagatgtacaaactggaaatttacaaacagggatggttagtattgagatagtgggatctcaggaggctgtgggagctggaggcagcccctacccaggttctgataggatataacacataagctgtgttcagttcaatttgatttcattctgttcctttacattcagttgactagagttggaatcagtctcactctcatttgaattgagttgaggtgaactggattaaattagattgtttagttcaaccataatcagtttagttatatttatttctatttggttgacttaagttaaaattgttcttgacggccaggcacagtggctcacgcctgtaatcccagcactttgagaggccgaggtgggtggatcatgaggtcaggagatcgagaccatcctggctaacacagtgaaaccccgtctctactaaaaatacaaaaaaattagccgggcgtggtggcgggcacctgtagtcccagatacttgggaggctgaggcaggagaatggtgtgaacctgggaggcagagcttgcagtgagctgagatcgcatcactgcactccggcctgggtgacagagcgagactccgtctcaaaaaaaaaaaaaaaattgttcttgacaaattagtgagccaggctgggctcagtggctcacacctgtaatgtcagcactttaggaggctgaggcaggaggatcccttgaggccaggagctcgagaccagtttgggcaacatagcgagaccctatctttgcaaaatatacaaaaattagccaggtgtggtggcgcacctgtagtcctggctactttggaggctgaggtggaaggatcacttgagcccaggagttcgagtctatggtgagccatgattgcaccactgcgctccagcctgggtgacagaatgagactctgtctcttgaaagaaaaaaaaaaaaaatagagagaagaacaagttggttgattgcattgagttttattgagtacaaattcattcatttccatttagttcatttacattcaagtcaagttgttctcaactgggttaaattgtcttgagttaggatgaactgggttgttggattagatgcaattgatttcagttgaattgggttgaattgggctaatttcagctgattatattcatttccattgattaacaaaggtgggttgaattgccctgcgtatgttcagttgggtttagataggtagaatcggattgggttgacttgggtagagttgagttcgagtcgatttatttccattattttgatttgggttgatgttgatcttggacaagttgattaggttcaatccaacggaattcatttgagtttaattcaatccagttaggttgaattgcactccattcagtgtgattggcccaagttcagttccattgatttaactcagaggaagaacttacttccgttaagctaagtgggcttaatttgcattcatttcatttccatttggtttagtggagctgggtttgttcaactaaatttggtttcatttatttccattcacttttagagtggagtctaaaaatcttaagctttatcaagctgcattgacatgagctctgtttgggccagtttatgagttcaattcctctctatatagatttcttacctgaaccatacacatgatgatgggatgcattcctctaaaacctcttgttcttcagtaataaactgaccgaggcaccaacctctggaccccctataaccgaggtctccactgtccatttcaggccaagaagggggaagttctcccagaggaacaggggcccagcatcaagaacctcgacttctggtccaagctgattaccctcatagtgtccatcattgaggaagacaagaattcctacactccctgcctcaaccagtgagttgtgtatctgtgtagttaattatctgggtgtcatcgtgtgtatgtatacaactttgtgtcttgtgtgtcaagatgattttgtctaattacacaaatgtgcacctgggggtaattgtgggtctgattatacctgtgcaaaattcaaatatgggtacaatttgcaaacataaacataaaattgtgtgtatgttcacaatcactggtataatcagacatgtattttgtatgtattcatttgcatgcataactgtgtgtacatatgtgtataattttttatgtgtatgtaggttaattaataatagtgttgctcaagtattactatgtgctaccctaatacatatcatacatttaaattgcattatatcttatatgtatggatgtaagtaattttgtatattgttgtggtcagtgggttttgggtttaatttgtatatgtgtaaaatcattgaatgcaattcaacgtacaatattgtacaatatacaatattgtgtattgtgtatgaatatgggcacagttttcatttgtggatttatatgtctgtagaattttcatctgtgttagctgaatgagctactgtgttctatttctctgccagatgagtgctagagaggactctagctttggggcgttaacatatcctggttagggaattaagatcagggatttggatggattgaagggtgggtggatgaatggatggattaataaacagatggggtcaggcacagtggctcacgcctgtaatcccagcactttgggaggccaaggtgggtggatcatttgaggtcaggagtttgagaccagcctggccaacatggtgaaaccctatctttactaaaaatacaaaaattggccacgcgcggtggctcacccctgtaatcccagcactttgggaggccgaggcaggcggatcatgaggtcagatggagaccatcctggctaacatggtgaaaccttgtctctactaaaaatacaaaaattagccgggagtggtggtgggcgcctgtagtcccagctactcgggaggctgaggcaggagaatggcgtgaacccaggaggtggagcttgcagtgagccgagattggccactgcactccagcctgggcaacagagtgagactccgtctcaaaaaaaacagaaaaaacaaaacaaaaattaaccgggcgtggtggtacacgtctgtaatcccagctagtgggagactgaggcaggaaaattgcttgaacccaggaggcagaggttgcagtgagtcgagattgcgccactgcactccagcctggggtgacagagcgagactccgtctctaaataaataagtaaataacagatggacagatagattggtagaaggatgactgtgtggataaaggaacggatgggccaggtgtggcagctcacgcttgtaatcccagcactttgggaggccgaggcgggaggatcacctgaggtcaggagtttgagaccagcctggccaacatggcaaaaccccatctctactaaaaatataaaaaattagccgggcatagtggctcgcgcctgtaatcccagctacttgggaggctgaggcacgagaatcatttgagcccgggtggtggaggttgcagtgagctgaaatcgcaccactgcactccagcctgggtgacagagtgagactccgtctctaaataaaaaaaaaggaatggatggatgggtggacagatggatgggtaaatggatgggtggatagctgcataagtgagtaaataaatggatagagggatggatggataggtggatggatgaatagatagatgggtcatttaatgggtgggtggatagttgtatgagtgggcgaatgaatggatggaaggacagataaataggtggatgatggaaggatggacggatggatggatgaacagatagacgggtaggtggctggatggacagttggatgaatgggtggagggatagatggatgaacaggtagatgagtggttgagtggatggatgaatagttggatgaatgagcaaatgaatggatggagggatggatggatagatgaatagatagatggataggtgaacggatgggtggatagttgcataattaggtgaatgaatggaaagagggatggatggatggatgggtggatagatgaatagatagatgggtaggtggatggatggatagttggatgaatgggtagagggatagatggatgaacagatagatgggtggttgagtggatggatgaatagttggatgaatgagtgaatgagtggatggagggatggatggataaatagatagatggataggtgaatgaatgggtggatagttgcataagtaggtgaatgaatggatagagggatggatggatgggtggatggatgaatagatagatgggtaggtggagggatagatagttgcatgagtgggtgaatgaattgatgaagggatggttggatgggtggataatgggtggatggatgaatagatagatgggtacatggatgggtggacagttgcatgagtgggtgaatgaatggatggaaggatggatgaatggatggaggaatagataaatgagttgttgaatgtatgggtggatagttgcatgagtggatgaatgaatgaatggagggacaaatggatgagtgggtggaggctcaaagggaaacaaagccttagtgcagagtcagtcagcagtggctatgagggaacctgaacccaaatccctctaccctaccctacactcctctgtggggcagggaaggacaaagcagcccatcccatctgccttctgcctgccaaagttttatacttccatgactttgccaggtttccccaggagctgaatgtgggtaaaatcagcgctgaagtgatgtggaatctgtttgcccaagacatgaagtacgccatggagggtgagtttcccaccccagtgttccccagcctggccacaccaggtggctgtacctctgtgtcccctccaaggctgtgagcaccctataataccctcatgcctgagttggaaatcagtgatggccagagtaggcagcctctctgccgagacagagggtggcagacccttccagctgtgccatcctctttgtccctggccagagcacgacaagcatcgtctatgcaagagtgccgactacatgaacctccacttcaaggtgaaatggctctacaatgagtatgtgacggaacttcccgccttcaaggaccgcgtgcctgagtaccctgcgtaagtcccctgccccaggcccaacccaagccagaactgtagcactgacagctagaaggaaagccagagaggaagactgacctacttagggttacctgggcatcaggggcatgggtggggcttgaatccagtgttctccactctcagccattgagcagttgactcctacagcccagaaaattcagtcaacagcaacaggaaccatgtgactttctcattttatccttttgacaattctatgagttaaggtgggatcattttaattcctattttgcggaggagaaattggagagttaaagatgccaaatggccaggcatggtggcacatgcctgtagccccggcaatctgggagactgaggcaggacttgcttgagcccaggagttcgagaccagcctggaaaagatagtcagatcccatctctaaaattaatgaatgggtcaggcacagtggcttgtgcctgtaatcccaggactttgggaggccgaagtgggcagatcacctgaggtcaggagttcgagaccagcatagccaatagggcgaaaccccagctctacaaaaatacaaaaattggccgggcgcagtggctcatgcctgtaatctcagcactttgggaggccaaggtgggtggatcaccagaggtcaggagtttgagaccggcctggccaacatggtgagaccctgtctctactaaaaatacaaaaattagccaggtgtggtggcagatgcctgtaatcccagctacttgggaggctgaggcatgagaattgcttgaacccaggaggcggaggttgcagtgagccgagattgcaccactggattccagctggggcaacaaagtgagactccgtctcaaaaacaaagaaaaaaattatccgggtgtgatggcacacacctgtagtcccagctactcgggaggccgaagcaggaggatcgcttgaactcaggaggcagaggttgcagtaagcggaaatcgtgtcactgcactccagcctgggcgacagagtgagactccatttcaaaaaataaataaatataaaaataaaatgaatgagtgaataaatgccacattccttgcccacggtgactcccagtacatgacagacccgagatttgaactcgggacatctgattcctgggctgtgtgttggaggatagtacggtgccgccggttcctgagaattgtggtgtcgttctctgctcccagcagcacaggaggatggctagtcttctgttgtacaagaaacgaaagctctggctggatgcggtggctcattcctgtaatcccaacattttgggaggccaaggtgggaggatcacttgaggccaggagttcaaggcctgcctgggcaacacagggaaatcctgtctctacaaagaagacaaaaaaaaaaattagccgggcatggtggcatgtgcctgtagtgccagctattcgggaagctgaggtgggaggattgcttgaacccagcaggtcaaggctgcagtgagctgtgatcgcaccactgcactttagcctgggcaacagaacaagacccaggaaggaaggaaggaaggaagaaggaaggaaggaaggaagggagggagggagggaaggaaggaaaggagggagggagggagggagggagaaaacaagagctcagagaataaacccacttgccatgggcagtttatctgaagaaggaaggaaggaaggaaggaaggaaggagggagggagggagggaaggatggacggaggactcagagaggactcagagaataaacccacttgccatgggcagcttatctgaactaggattcccacaggcctgggccctgttgtaaaaggggccactcaatctatttcatgagcaaagtaactgaggttcagtgcaggaggcgagcagaggagcagccactcaaggctgcagggagagctccaggcagagcaggagcagccatagctccactcgttagtgggtcagaaccaggcggcgcagaggttgaggaggacaagaggtggcagagccccaccccggctcttcattccagatggtttgaacccttcgtcatccagtggctggatgagaatgaggaggtgtcccgggatttcctgcacggtgccctggagcgagacaagaaggatggggtaagaaggcccacccacaaccaagttcctaatcttcccactggggtcaatttaggtggaaatttgcccttgagatgaggccagtctctggtaggtgtccgccatctttgtcttgctcatggtttttaaaatcttttgttcattcatcaactacaaaatgtgagttccatcaagccggacacctccaggcaccccatggcttctgcgtccacctctagagttgactctaagtctacctcgccctctgtccatctcaccccggggaaattggtctctggctctccccgtggagagtgggagagttgggctctagggattctctggtgctgatctcctccttcctcttggcctccttccccctgcagttccagcagacctcagagcatgccctattctcctgctccgtggtggatgttttctcccaactcaaccagagctttgaaatcatcaagaaactcgagtgtcccgaccctcagatcgtggggcactacatgaggcgctttgccaaggtgtgggagagtgggtagggttggggctaggggacagggtcagggttagggaattgaagtctgagttggagatgggctaaggttgaggttgaggttggagttggtgatgtcattgaggttgggattgaagttggagtttgggttgaggttggagttgaagtttgggttgaggttgaggttgagatgaggttggagttgaggtttgaatggaggttggagttggggttagggtttaaattgagattggagttgagattggggttggagttgaggtgtagggtaaggttggagttgaggtgtgggttgagatcagggttggaattgaggtcattagtgcgagttggcaatgctgtttggttggagtttgaggctgtgctgggtcttgatttggaattgagattggagtgagtgctgagattgatgcacaatttgagtgagtcttggggtgagtttgagggttgggatcattggggttgaggtttgattcattggcattaggctgtgttgaccttgggaattacaagtaggaattggcttttgatttgagatcaggtcatcttgtggttgaggctgggttaatatgatgcttggttgctctgaaaaagagctgggtctacataaaatgatcatcttcatcgagcggtatctcctctaggtcttgatggtcatcttgagtggagaatttgcctagcccaaaggcccatcttaggtcctaatagggtttgggttcatcactgatctcactagtggccttgatgggacgactggcgcctgccttggtgccagcctctcctctcacccacactctgtgtcttccccagaccatcagtaatgtgctcctccagtatgcagacatcatctccaaggactttgcctcctactgctccaaggagaaggagaaagtggtgacctgagggggcccctgacctatctccctcctcagccccattcagcatccccaggactcccttctccccagggccctgacacctggggctatgtatgtccacctgtgtgtgatctgactggattgtctgtgtgtttagaggtgcttgtttgaatgtgtgtgatcagagtgtatctagttgtgtgtgtctgagtgtatgggaagtaagtgcatgtgtctgactgtgtattgtctgtgttgactggtatactctgcgtgtgtgtgtgtgtgtgagtctgtgcacatctgagtgtgcgtgtctgatcatgttttgtctggctttgttaacagggtatggcatgaatgtgtgtgtgagtccaactgtgcacgtctgagtgtgcgtgtgtgattgtgtttcgtctggttgtgttaactgggtataacatgagtgtgtgtatctgtgtgattgtgtttcgtctggctgtgttaactgggtataacatgaatgtgtgtatctgtgtgtgtctgtacatatctgagtgtgggtatctagccatgtttcatctgtgttaaccgggtatagtgtgagtgtatgtatgtgtgagtatgtgtgttcaactatacaacacatctaggtgtgtgtctcatattttatctagctgtgttaactggttatagtgtgagtgtgtgtatgcttgtgtgtgtgtccagctgtgcatgtctgggtgtgtgtgaccgtgttttgtctggctgagttaactgcatatagtgtgagtgtgtgtgtgtgtttgtgcacgtctgggtgggtgtgtctcaccaggtttggtatggcggtgttgaatgtgcgtggtgtgagtgtgtgtctatggctgtgtctggctgtgcatgtctgagtgtgtgtatctgtggggggggtctcgtgtgtatatctcggggtgagggcacacgccttcagtgtgtcactgtctggctgttgcaaatgaagccttcagggtgtgagctgcaaagctttgggctcttgcaggaaactctgctactcccagagttcccagcccctctcatggaccccccaccaggcctggggtcgtgggattacttgagtcctccttgcccccaccagtccccagagatgcccgccccaacaacacgcccaggaacctgagcacaaaagctcccttccatttgcaggtgaccccatgggaccccagcttcctccagacccagaccctgaaaccatcccaaggtccctggcggtgggtaggggaggctctggggagaggtcctgaggcttgactcccctctctgttcccacccacagccctgcattctcatgaataacactcaacagctacgagttcagctggagaagatgttcgaagccatgggaggaaaggaggtgaggcagggccgaggcagggctggagaagggatggggcacccccaccactgtgtccctgcaggcccctgagctcatatgccaccaggcctggggatgaattccagctcaaccatggccttaaacccaggcttgcagcataacggtctgtgcctcagtttcccctgcagccccttgggatccctttccctgggtcagatgagaaaatgcccagtacatgtggatacttactgaacctggcctggtgtcccttctccctccttagctggatgctgaagccagtgacatcctgaaggagcttcaggtgaaactcaataacgtcttggatgagctcagccgggtgtttgctaccaggtgggagcatctccagggctgggggcagtggggagggaacagccttcagccctctaagcctggggcatctggaggctcagcagatgtagaggtgaagattgcaggctcagagttagacaaggctgagttcaaatcttggctttactgcttactagctgtgtggccttgggtgagtcacttaacttctctgagccttatttttttttttattgctctgtaaatttggggtgatgacaataatagtacctgggtaggattttgagaatgaaatgaacaatgcgggcaaatgtcttatccctttgcctggttctgcagttactattttccactctttttttttttttgagacgaagtctcgttctgtcaccaggctggagtgcagtggcgcgatctcggctcactgcaccctccacttcctgggttcaagtagctgggactacaggtgcatgccaccacacccagctaatttttgtatttttagtagagacagggtttcaccatgttggccagggtggtctcgatctcttgacctcgtgatccgcccgccttggcctcccaaagtgcttggattaaaggcgtgagccaccgcatctggcctgttctccattcttgctcggttatgtgctgtgatgcaaatgatatgacctcaaggaccacagatcagcatctgtgtcctcatccagcccttcctgtggtctgagcccttcccttctgtgtccccagcttccagccgcacattgaagagtgtgtcaaacagatgggtgacatccttagccaggttaagggcacaggcaatgtgccagccagtgcctgcagcagcgtggcccaggacgcggacaatgtgttgcagcccatcatggacctgctggacagcaagtgagctgggccaggtggactgggctggccggggaggggctggggcagggccatagagacccagggactggctggagagggtgtgcagggaatgtttgctgggtggtcactggatagttggatggctgagtagatggtggcatgaaggggatggaaagttgggtgggtaaataattggaaggattggtgagtaaatatttgtgtggatgaatgaatggtggatgaataggtgacatgagggatgggtaggtgggtggacgcatggattaaaagataaatgtttagaaggatagagggaggatagatgttttaaaaagatggatgggtggatagttgggtaaatatttggatggattaataaatgttttgatgcatagatggattgatgcttagatggatggatgtctggcaggctggcttgatggatggttggatggacgatggatggatggatggatggatggatggatggatggatggataaatggttggatatgtggataaatatttggatggatgaataaatgttttgatgcataaatggatggacagatgggtggatggatgaataaatggatgggtgggtagatggatggatagataggtggataaatatttggatgaatgaataaatgttttgatgtatagatggattgatgcatagatgtctgtctggctggctggatggatggatggatgaatggatggatggataggtcaatagatatttagatcattgaataaatgttttaatgcataaatggatggacagatgggtggatggatgaatggatggttggatgggtgggtgggtagatggatggatgctggatagatataggtggataaatatttggatggataaataaatgttttgatgcataaatggttggacagatgggggggtgggtggatgagtgggtcgatggatggatggattaataggtgagaaatatttggatggatgaataaatgttttgatgcatagatggatggacagatggatgaatggacaggtggatggatagataaatggataagtggatggatgggtagaaggatgcatggaaggatggatggatgaacagatggatggatggatggatagaaaaagaaatagagaattaaggaccactgggggagggatggattggtgggtgactggatcagttggtggatggatcttggtggactgcctgtctccttcaacccctatccatccaaccacaatctctttgctgttttccctttcaagtctgccctcctctgaccattcccctcctgttcctcttgggcatggccttctccctcatagtccctgatctccatccttcctgtttcggttcatcccccacactgttctttcaaacatgaaagtctggctgtgtctccctcttgaacactccatggctccccactacccccatcctgataaaacccaagccttcctcccagacattggggccccttcccatctggtccctgctgactagtccaaccaccactcactcttctcttcatgcatcagatatcatagccccatcaaaccacccaggggtccctgtacaggctgtgggccctctttcctatctgtggaatgccttgcccacctgttaagggaaggtgatctgtgggtgggggcgagctgggccctctctcagacctgcccctcgtccccagcctgaccctctttgccaaaatctgtgagaagactgtgctgaagcgagtgctgaaggagctgtggaagctggttatgaacaccatggagaaaaccatcgtcctgccgcccctcactgaccagacggtgagacctgcagggggcccgaggggacatttaggccacctccctggcgagagcccagaaaacttggtgcctagaggctggggggtaagaacaaaggcatccggtctcagagaggtcatccaggctcaagggccattcaagggtcatggaagccaccagaggtcagtggggggccattcagaggtcagagagttcacacaggggttaaagatcatcgaagagttaaagaggtcattcagagtccattgtattttctctggggtcaaagacatcaggtagagtcaagagaccactaaagtcatagaggtcacatgtaggtcaaaatagctttcaaaggtcagaggtcatctagaaaacaggtcaattttgggatcaaggttatccttgagccacggaaggcatagacattggccaggcaccgtggctcacgcctgcaatcccagcactttgggaggctcgaggcgggcagattgcttgaggtcaggagttcgagaccagcctgggcaacatggtgaaatctcgtctctactaaaaatacaaaaattagctgggtgtgatcctgtgatcctggcttcttgggaaactgaggcacgaaaactgtttgaacctaagaggtagaggctgcagtgagctgagatggcgccactgcacactccagcctgggcaacagaacgagaccctttctcaaaaaaacaaaaaaaaaaaagagaaggcatagacatcaatgggtttttctaagggctttggggctcattcaaaagccaaagaggggagacaccatggacttcagacatcagagatcaatagaccaaggggctcctggaagtcagccagaggtcatggagggcatccaaggtcagagaggtcaagcagagatcattggccatccagagaccaggaccgatagaccagaggccataatctctagggaccaaggggacccaaacatctgtagagggatgtagctgggcgtgggtccctccgggaggcatcaagaacctgaggacagcaatggcatgtgggctgtgggcacattagggagtggggaggtctttcccaggtggaccacggaggcttggggagggtgagcgggggccatagatgggcgacgatggtcggggaggctcggacttcccatccttccacctcttctgggctgggctggggcaggggtcttgcccctccgtgctgccatctctgccccctccctggccttcccgggagactcatggtaccttattcccccctcccccaccgccccgcccccatcacggatgacagatgatcgtaagtagagtcccgtctgtccgtctgtctgtccgtcctctctgtgtctggactcggcccaccgcgtcgctgcacccctctccccacccacccagcgccccctcctcacccaccatcctccctcccgcctagatgtgcctgtgtctgtctggggcggggcatggggagggggcggggctgggagggagggagaccacgcccaccctccctgtcccactgaagtccagaggagccccactacccactcccaaaccccaagcccagctcctccttcgcagcggacctgccgtctaagggtagaatccaaccttgctcccgtgcccagatgtcaccagacgccctgaagctagaaagaggatcaaccccaggattcctctgacctcctctttgggctctgaactgtcagcagcttcccagaatgcaggtcctcaccatgagggtctctacttctgattcctctgaaattccatgctccagaccattccttggtaccccaccaccctgtctacccaactcccgccatccacaccgacacacaccaatcccagacatacacccaggtgcccaagtgggagacttttgtcatggctttgatgtcaggtagacttggggtcaaatcctagcccagccactgtctctctctgtgaccttgggaagtcacttgacctcccagcctctgtttccttgtctggaaaatggggctcattgcatcacctccctgagggtagttctaagaaccaaatggcatgatgcattaaaatactcatctcagtattgcctgaacccaggaagcagaggttgcagtgagccgagatcgcgccactgcactctcagtgaccggcccagaggcagagctaatggtggtggtggtggtggtggtggtggtggtgatatgcagacatgtgtaagagcagagacaaaacaacttcagattttccctttgtgggcaagacaaggctgttacaagatttcactttgttaaaagtttacaagggctcttacttcctggtagctgcagcctgggtctttggctataaccacttggtggcagcatacccaaccacaggcaatgcatttgtaggcagggggaataaaggaattcgcatttaatgactccccatatgccaggccttctcatagctcctgtttcagctcaccttcatgataaccctttgagtgaggtggatattattatccccattttgcagatgaggaaagctgaggctcagagaggagtcacttgttcaaggtcatatagtaaatatatgccagaatcaggattcaaattcagatctgtctgaatatgcagcccatttgctttcctgttaacccaagaaccaagagtctcatgtgtacagtaaatgtaaatggattatattttggcagtggcttttttcccttctttctgactttctttagctctgtatctgtatctttctctctctttcctgtctctgcctctcacaccatttaagagtgagtcactaaagcgcatgcacgtgtgtgcacacacacagacacacacacaaacacactatccccatgcaacccagtcaccagtaccctgtgcagtgtggattcccccatccccatgaatattcctgtgagcatcccagcttcccaccctgcacgacttgccaggttgatcaccctgtgacattatctctgcaggggaacctcttgagaaaacatggcaagggattagaaaaggtaatgagggcctcgtctcactgaggccctgagctccagtgtctgggcatgtgtgtgcatgtgtgtgcgtctgtgcacctgggcaggaagggcagctgggggtcgtgggtaggagatagctctcctaaccaagtcctgcaaaaccagaagtcagagatgaagtgattctccagggacagaacgtgcagtgtgtgtgtccacatgtgaactaatgtgtgtgcacaaacagctcccatcctcccacagcaatacccacagggctcatctgagccctgggctcagctgaaattctgtgccttcttgaggagcctacacgctagatcaccaccctggactgagacgtgttgttttttacgtagatttctttttgttgctgtgctaatgggtgtttgttgttaaggagatgggagctacagcaacacgcaagcagctgtcttgctgtacacttgtgcagaagatatcgttgtacatttgtgtctacaaatggagtcttagctttgtgaatgtgggtcacaggggttccgtactctctctgccagccctttgcggggcacattcagtgtcccaggcaccctatatgtggatgtgaatccgtgtggggtcaagaagggtgtgtgggtttttgtgtgtgatataattgtgtacgtgcctgcaagtgtttaggagtgcacgtatgtagtttagtgtatgggttcttcagcactgagtgaacttacagtatatgttaatatgttttttgtagacttgggtgctgggatataggggcagccccttagggaatggaggaggagacagattcctagccctgtctcatctccccacctccccaggtgccccatcctggggcaggctgactgtgggatgaggctgcttccagcctcctgggtaccccgagagtgtgctggcagtcaaggagtctgacctctaaacccctgctaggggaccagaggaggtgctagctggggagggggcccaccattagacccaggacctggggaggagctcctgggctgggaagtgagactgtgctttgagggggcagggaagtcccactgagtatcctcccaacagtcaccagaactctgacctccacctgattctctccacagggcagggtgaaattgccaagccactcagacgtaagaccggcctctcactgtctgtctggctcccatcccactcccccccaccccacccctgtgcccccttccacctctgtggttcgtgccgtccgagggcgtactgtgaacctgtctgttggtctcttcttcctttgtctgtctggcttgctcgtggggggtggtgggtggggggttggtgggtagggcagagggtacccaggaaggcccctgagccctgccagactacaggtgggtgcagcaggggaaactgaggcccagtccgctggacccctgagtaactgtgccttgtaagaacctcaggatcacagacaagaaataagaatagtaacagccaagatgataatagtaatacctctaggaatgaccagatggccagctggtagactatgaacataattccaaatatttccacagtaaatgggccccctccccacctagcctcacccaggacccccagaccaccccaggacccagtaagacaagacttgttacctcaatactcagccccaccctgtcccccaagttaccatgggtatccctgttagccacagtgggaattgaggctcagagcattcagggacaagcctggggccatccagcagtgacagaggaggctagacacatgccttccaggctgggaccccgtctcccttagcattgcccgtgactttgagaccaagtgataattagcgaacactgagcaaagacttgttcagtccagactaagccacaaagtggatataattttcctcatctagatgggaaaactgaggctcagagaggttaagtgccttgcccagggccacacagcaggactgcaatttgaacccaggcccatctggcttgtcagagccatcaccacatcaccatcttgctagtgtctgtttgggggtggggtggaggacggatatggaggtgtttgtatagagggaggatttttcctttaaaaggtcagactggctggcaatgtggctcacgcctgtaatcccagcactttgggaggctgaggtaggaggatcgattgagcccaggaattcaagaccagcctggacaacacaacaagaccccatctctatgaaaaaaatttcaaaaactagctggatatggtggctcacacgtgtagtcccagctactggggaggcgggaggattgcttgagcccaggagtttgaggctgcaatgagctatgatcatgccactgcactccagcctgggcaacagagggagactctgtctcaaaaaaaaaaaaaaagaaaagaaaaatcagactgaaattcctcccagattacaggggaaatttccctgcagaggggatgctccttgaggaggaggaagtgtttgaccagagccattttctgcaacctcagcctagcctattgtgttcccaaagctccctttccctggaaaccctgcccacacccacaaacaccaccgtctgaggctcccccaacccactgcccctcacagtctggtccctgtctgtttctcctgttacacaagcctgggtggggctgagagggtgggggactatcctcacaggaccgggattttcagggacaaggtcaccacatcctcctcagttcttcctggggaattccagacctctgtccctgggacacaattattgccctgcccagagcctttgggcaagaaccaagatggtctctggggctggagtgtcagctgtagcacccctgccctcacccagctgtatgttgttacctgcagggaacccagatgatcttcaatgcagccaaggagctgggtcagctgtccaaactcaaggtgaggagtggggatagattatggcgtgagggactgccccccaaactcatgtggcttccaggttgccaccatcctgggggaggggtcccaggatgatgacatgcattacaggctcaaaggacagaaactctactcactgaagcacaagatatttgctccccagtgtgtcagaaagatgtgaatggttcagcttcaggtacagcttgatcaagagggcaagtcatttattcaaccaatattttttgagcacctgctgtgtaccagtcacatattgggtgctgggatgatgaaaacatagaccctcagcccagctcctccaagttgaacagggatgagacccatagacacagattccaaaggtggagcccactccacccacatggcccctctccccatccatccaggatcacatggtacgagaagaagccaagagcttgaccccaaagcagtgcgcggttgttgagttggccctggacaccatcaaggtgagaggccctacccctccccatcccaggtgggggatgtagagggtgtggctgctgtggtcatggacttaggctcgcctcggacccacattaatttgttcaatttatggacactccctcgttcccctgtctgtgccagagctgggctggctaatgctggagccttaaggagccccaggtcggggaagactgctggatacagacattctcagccttgtaggattaggcttggggtagagggaaggatgtgggctgggggagcccaaagagtgagaaggtgtagagggaaggatgtaaaggacctcgtgccaggcatttcttgaggtgtagaagggtagagggaaggatgggggctgggcgagcccaaggtgggagaagccaggccttcctggaagacggcatgtgagaggtgggttctgaggaatgcataggagttcactaggcaaagcaaaggaagaggtgagaaagtagtagcgggaagaattgggagtggggacagcagggctacccagccctatgagtgggtagaggttcccaccatcctcacctctccccaccctgtcctccccagcaatatttccacgcgggtggcgtgggcctcaagaagaccttcctggagaagagcccggacctgcaatccttgcgctatgccctgtcgctctacacgcaggccaccgacctgctaatcaagacctttgtacagacgcaatcggcccagggtaagggtacccagaccgcatcaccctttcccgctccgcggagacagccccgccccaagcctgaacggctgccattggctcactcccctgtgacgtcatggatggggcggaattgacatctctgcaccaagtccagggaccaatgagcgatcaaaggttcatgggggcggggcctctgacgtcacaggcctggaggtgatcgtcaacccctgggaaaatctgtgatgtcctggggccagacaatgattaacagctctgggatggaatgtctttgacatcaaggaccagggtaggattgatgactcttaggtgtggaacctgtgacgtcgtagggccacaaggtgattgtcatctcctgggaaaatcaatggtgtcccagggccaatgaatgattgtcagctcctgagggacctggacagtcatgggtccagggaatcgttgacagctctgggagacttcaggagtgattgacagctcaggatgggcaggacctctgatgtcaaggggtcaaggaatgattggcaggtccatgggtgggaactttgacgtcatggtcccagagagtggttgaactcccctgaggagggacctctgtgatgtcatggggctaaggaatgattgacagctccgagggcgggagggacctcgacttggtgggggagggtggacggagagggagttcccatttctcaaactctctctttctctctgtattttgcttcggtctcctgtccctctctgagcgcacacacacggcagctggggctggatggagggcaggattccctggggacccccccttttcaaaattggtcccgacaaggggaagaagtttggcggcttgaactcaggagggggagggagaatcgccatcgacacccagcctggggcgaggggagcaaagccctgtggcctccaacggcccccttctcccccgatccagccagcccaagggccctccgtgggcgctgggtctctgagctcagcttcccttccagtcctggctgcttttagtgtccctggtgtccctggagcaggaggctgtctgtctctccgtctgtctgcagctgacgtttctctctctcttgtttttcctccctctcactcgccgtcccctctccgcgcctcccctgccccctccacacacactcctccatcctcacctctcactggctcgtctctccccgctccccatgcttcccacctctctcccccttccacccccacccccaattagtccatggtggaaaaggtactaggtttacccttagtgaagacatttatcctgagaagggtacgtgcctccgcctcccgcccgccgcccgcgcctggtgcccggtgcctgcgcccctcctggccccggctagtaaaaggatcgtccttctgcctcaagggcctgcagggccgccgcccaggcctgagcggcttggagggcccaggcgggtgagggggaaggacgatttgctggttctacatggggaagaagcgattccagtgggaatcccagaatccatttctcctgatatgacatattttttaagccagatcctgggaccccgggacaggcacctgtcaggttaagagctgggctctgattccagcccagccactccacgggtaggcaccttgggcaagaatctgtctccctgagcctcagttttctcatctgtaaaatggggacagtcaaggaccctacttcataggattattgttattgatattattatttagagacaaggtctccttctgtcacctaggctggaatgcagtggtgcaatcactgctcactgcagcctccctcctgtgctcaagtgatcctcctgccccagcctcccgaggagctgggactacaggcacacgtcacatggctagctaatttttaattttttttgtagagaggtggcctcactttgttgcccaggctgatctcagtgaatacttatcaggctctaaggctgagcaggaccttgtgccaggcatttcttgaagaatctgtgtttggttttgttgttgttgtttgagacagagtctcactctgtcacccaggctggaatgcagtggggaaatctcagctcactgcaacctccgtccgcctcctggtttcaagcgattcttgtgcctcagcctcctgagtagctgggattacaggcccgcaccaccacgcctggctaatttttgtatttttagtagagacggggttttgccatgttggccaggctggtcttgaactcttggcctcaagtggtccacccatcttggcctcggccttccaaagtgctaggatgacaggtgtaatcccagcgcctggccattttgtttttaatttgaggcagacgctgtcacccaggctggagtgcaatggcgaaatctcaggtcactgcagccgccacctcctgggctatgttgcccaggctggtctcgaactcctggcctcaaatgatcctcccaccttggcctcccaaagtgctgggattacaggcatgagcctccatgcctagccttcttggggaaactgaaacagatttctttaactgccccacgaggggtacatcattccacagatgagatactgagagccaaaggagattcaaccacttgtccgaggaaccttcccctgcaggggtcccgggacttggggagtggggagtggggttggaagaagcactgagaggcccaggaaagacccttccccgcgaagccagcaaagcacgggatgggggcacccagcactgcctccctccccccttcttactagctttggccttggtctgacccctcacctgacccaccactgtccaattccccctggcacccccggcaccccagtctggcccggattgagcttgctatgaagcatcggcctgggggagggcggggcggctgagcatgtgactggtggcggggggtgggggtggaatgggagcctgaggcaacaaggaagacggcctggggcgtgcagcaaagaccggggccacataccccagtactggggtgatgggggtctccaggcccctgtgctccccaaccctcagtcacttcctgtccagcgtgaggtaacccaatcagcgtttgactgacccaacctcccaccctcacctctgactttccccttcttctccccgtgcatggggtggtccaggagtggggagttgcctggtggggggtggggaggggttggtggaggtgctggcggtcacaggtccacaggccccacaggatgcccttttgagtcacagaaggcgggaccgggagagattcttttaagctgccccatcagtgatccccattggcaccatggaggacacggctggtggccccaaacagaagcccaccacaccatgattcaagcagacaagggaactttttgactccataatggaaaaattaggggttgaggcctggcgcggtggtgcatgcctgtaatcccagcactttgggaggccaagttgggcggatcacttgaagtcaggagtttgagaccagcctggccaacatggtgaaaccccatctctactaaaaataacaaaaattagccaggcgtgttggtggatgcctgtaatcccagctactcaggaggctgaggcaggagaatcgctttaacctgggaggcggaggttgcagtgagccgagatggtgccattacactccagcctggtgacacagcaagactctatctcaaaaacaaaaaagaaggccaggtgcggtggctcatgcctgtaatcccagcactttgggaggccgaggcgggcagatcaccaggtcaagagatcgagaccatcctggccaacatggtgaaaccccgtctcaaaactacaaaaattagctgggtgtggtggtgtgcacctgtagtcccagctactcaggaggctgaggcaggagaatcgcttgaacctgggaggccgaggttgcagtgagccgagatttcgccattgcactccagcctgggcgacaaagcaagactccatctcaaaaaaaagaaaaaaaaaaaaaaaaaaaaaagaaacttaagattctgcactagaagggaaataggggtaaggaaaataaaagatgccgctatgagctgtcacatcaggagggatgaggattctgggccaggtgatgcaatgaggtgacctgtggggctgggtcagagttaacaagggcaagaatggggtgagtggggagaggtaatagtaacctattggaaagggccactattggaaggggtgttgcaggtcacaaaaaccactttgattatctcagagtgaggtgggagccatggaagagtttggttttgctttgttttgttttttgagacagtcttgctctgtcacccagactgaagtgcagtggcgggatcatagctcactgcagcctcaaccagctgggattaagcgatcctcctgcctcagcctcctagatagctgggactacaggtgcatgcatcaccacacctggctaattttcttttctctctcttttttttttgagacagggtctctctctgtcacccaggctggagtgcagtggtgcaatctcagctcactgcaacctctgcctcccaggttcaagtgattctcctgtctcagcttcccaagtagctgggattacaggcgtgcactaccacacccggctaatttttgtatttttagtagagacagggtttcgccatgttggccaggatgggcttgaactcttgacctcaagttatctgcccacctcagcctcccaaaatgctaggattacaagcatgagcctcccaaagtactggggttacaggcatgagccaccactgcccgacccatggaagagttttgagcagaggagggacatgatctgacttttaaatgttatttatttattttttaattttctgagacagggtcttgctctgtcacccaggttgaagtgcagtggtgcgatctcgtctcactgcagcctggacccttctgagctcaagtgttcctcccacctcagccaccagagtagctggggctacaagcacgccccaccatggccactaatttttgtatttattgtagagatggggttttgccatgttgcccaggctagtctcaaactcctgagctcaagtgagtttgcctcaccctcccaaaatgctgggattacagctgtgagccaccgcgccctgccgacatgatctgacttaataggatttttctggctggtatactgagagtagatgaaagagtggaaggaagaccagcaaggaggctactgcaatagtccaggcatgggatgctgggggcaggtgtaggatacagggaaaagacatggctctgcttctggatgtattttgaaggtagagctggcaggattttccagtttatgggcacctagggaggaagtgaagacaaagaagagtgtcaaatattgaggtgcagggtcagtttgaggacccacggaggagaaaatgacaaaagggggttggagggagtgacaactatgtaggatgagaatcgagttggtgacattgttgcagccaagaggacaaacagccacaggaggccagggtgccagatgctgccaagatgtaatgtaacatgaagactgaattttgacaacatggcaatcaatggaataagaaaaaagaaaagaattgcattaggctcagagaggttaagcaatctacccaagatcacacagcaaggcagtaaaaggccagaacccaggattcttggcttcccaagagcacctcccatcctggccccccatcagtgcctccctatcagggctgatgacctggtgccgccagcacaggtgggtgggaggccgtcaaggtccctcctggtgggtgggaaagaacagagctcacgctgaccatcctcccctgccctgcccaggcttgggtgtagaagaccctgtgggtgaagtctctgtccatgttgagctgttcactcatccaggaactggggaacacaaggtcacagtgaaaggtgagtggtctgaggtgggagggacttgctaggttctaaaacagaaaccaaactcaaactggcttaagcaacaccctttttttgttgttgttgtttaatggtccatgaaacggaaacgtccaaaggtggccaccttcaggcatggctggatccagcagtgtaaacagttttgtaagactgaatcccactttctccatctctcagccctgctttccttttcttggcttttgttgactagaacacagattgggctgtttttgacatggcttaaataagacagaattaggccaggcacggtggctcatgcctgtaatcccagcactttgggaggccaaagctggcggatcaggccaggagttcagaccagcctggccaacatggtgaaaccctgtttctactaaaaattcaaaaagtagctgggtgtggtggcgtgtgcttgtaatcccagctactcaggaggctgaggtgggaggatcgcttgaacccgggaggtggagtttgcagtgagctgagattgcgccactgcactccagcctgggtgacagagtgagactccatgtaaacaaacaaacaaaaatgatagaattggtttttctctgggataacagtttaagtagcaaccagcctcgagctgatatggaggcttcgcagtgttggtgatctgtgctgctgccatcttttgttgcattttcatccctaatgtgttgttgttgttgtttgtttgttttagaggccagagtctcactctgttgcccaggttggagcgctgtggtgcaatcacagcacactgcagcctcaaactcctgggctctagcgatcctcctgcctcagcttccggagtcgctgggattgcaggcatgcagcatcacacctggctactttttaaattatatttttgtagagatggtgtctcactatggtatccaggctggtctcaaactcctggcctcaagcagtcctcccacctgggcctcccaaagtgctgggattccagacgtgagccaccatacctggacccaaatgtgtttttcctccactatagggtcacaaagagctcagcccccacaagcattgcagactgcggctagaggaaggagaaagtttggggttcactccctgccttttaagccacagtggagaagtagtacacgtgatttttttctctcacctcattggccaaaacatagtcatatgaccacacttagcttcatggcaatgctgggaaatgtagtctttatttcagacagggtttttggcggcgggcgaggggtggggtgtttttattttttattttttttagacaggatcttgctttgtcacacaggctggagtgcagtggcacaatctcagctcactgcaactgccgccacccaggctcaagcaatcctcctgctttagccccacaagtatgtgggactacaggcgcgtgccaccacgcccagctgatttttgtatttttcgtagagacagggtttcaccatgttgcccaggctggtctcaaactcctggactcaagtgatccacccgccttggcctcccgaagtggtgggattacaagcgtgagccactgcgcccagccttgggcaggttttgagagccacaaacatctactttttccaactgggagaacctgacctgtcttaccctctacttcctccaacagtggtggctgccaatgacctcaagtggcagacttctggcatcttccggccgttcatcgaggtcaacatcattgggccccagctcagcgacaagaaacgcaagtttgcgaccaaatccaagaacaatagctgggctcccaagtacaatgagagcttccagttgtgagtttgggatgctttgaagagcatgggggcaagggagggggcatccgccaggtgaaccccaaagccagctaggcaggaggtatctggaatctgggcccgggaatgggaggggccacattctaggtgggggtgctggaaagggagaccccttagtagtgcaggaatgacatcagggaggggacacgaggatggaggtcacctttgggggctggcagatccaaggggaggcaatgagtagagtggggtaacttcatgatgaagacttgcagaggggagggaaagtctgggcaggaagtgcatggtgggcagggccattgctggggctggagactctgtctggtgaaggaatgagggtggcagtgatgacgcttatgagcggggggctgagggacctggggacaggactgaggttgcatgggggtggggactactggagtctacattgagccttgtcaggaccgttggggcagcccatctggaggagtcggctctggggacaggagtggagtgtagatggatcccaggcttgggggtgggtgtcacgtggggtggaggtggggtcacattggatggaggttcttggagttgggagtgggcctaggctgcgggtatcaggatagggtctagaggatgctgatgatgtggacagcataaaaaagtctgctctggccgagtgtggtggctcacacctgtcatcccagcactctgggacgccgaggcagacagatcacctgaggtcaggagttcaagaccagcctggccaacatggtgaaaccccgtctctactaaaaatacaaaaaaaaaaaaaaaaattagccgggtgtggtggcgcacgcctgtgatcccagctactcgggatgctgaggcagaagaatcgcttgagtccgggaggcggagggtgcagtgagccaagatcgagccattgcactccagcctgggcaacaaaagcgaaactccacctcaaaaaaaaaaaaaaagtctgctctggccgagcatggtggctcacgcctgtaagctcaacactttgggaggccaaggtgggcagataacttgaggccaggagttcgagaccagcctggccaacatggtgaaactccatctctattaaaaatataaaatatggctgggtgtggtggctcacacctgtaatcccagcactttgggaggccaaggcgggcagatcacgaggtcaggagatcgagaccatcctggctaacacggtgaaaccccgtctctactaaaaatacaaaacctagccaggcgtggtggcgggcgcctgtagtcccagctactcgggaggctgaggcaggagaatggcgtgaacccgggaggcagagcttgcagtgagccgagatcgcaccactgcactccagcctgggcaacagagcaagactccgtctaaaagaaatatatattatataattatatataaaatatgtatttatattatataattatatataaaatatgtatttatattatattatataatatataataaatatatatcatataaatatatttttatatattatatataaatatatatatatttatatacatatataatatatatttatattatatataaaattatatatagtatatattatatagtataaataaaattatatatagtatatattatattatatataaaagtatatatattatatatttcatatattatatattgtatataatatagtatatacaaaaaatattagctgtgtgttgtggtgggcgcctgtaatcccagctacgcgggaggctgagacaggagaatcgcttgaacccaggaggtggaggctgcaatgacccaagatggcgctactgcagtccagcctgggctacagagtgagactcaaaaaaataaaaaatacagaaattagccgggtgtggtggcaggcgcttgtaatcccagctactccagagggtgaggggtacgagaatcgcttgaacccaggaggcacaggttgcagtgagccatgattgtaccacggcactccagcctgggcgacagagcaagactctgcctcaaaaaaaaaaaaaaaaaaaaagtctgttcacgggggtagatggatggtggtggttagcaagggtagagttggggtcatccggggtagatccttgggtcgagtgtcagcctcacagagcactggggcagggcaatgttgttggatgttcttaggagacagaagtgcagaagaaagtagtcccagctacctgggaggctggggcaggaagatcgcttgagctcaggagtttaaggctgcaatgagctatgattgtgccactgcactccagcctgggtgaccgacatagcgagaccctgtctttaaaaaaacaaaaaactatgggccaggcgcggtggctgacgcttgtaattccaacactttgggaggccaaggcagtggatcacctgaggttaggagttcgagaccagcgtggccaacatggtgagacccccccccccgccacccccatctgtactaaaaacacaaaaaatcagcccggtgtggtggtgcatgcctgtaatcccagctactagggaggctgaggcagaagaatcgtttgaacccgggagacagaggttgcagtgagccgcgattgtgccactgcactccagcctgggtgacagagggagatgcccactcaaaaaataaaaataaataaaaataaataaaaatgcacaggggtaagggtaaatcagagctggttagctggtattatctagggggcctgggagctcttatgggacaagattgaagccagttccatgtcgtgtcagcacagggctcttggtcagaaggttttggggcgattggcccctttaggggatactcaggaggagaagcatggtctagtgggaggtcagatgtcagccagggtgggccggagtacttcagggatagaggtacaacctgggaggtggacaagagggagaagctgggcgtgaccctgtaggaggggctcttatccagctggcgtcagggcaggtcactgggactgcttaggggcaggagcacaggtgaggggcatgcgggaggcggtgtcacccatggtgaggcaccagggcaggctcatgtctggagggcatcttggaagtaagaggggtgggctgggggtgtggggggctggggaaagggccacgtcgtgggtctagaggagagcctggttaaagagcttctgggtgggacattaggggcagggccgtgcgggcagcagttcagccggcagagggcacaggcgcgggtatctcagggtgggagcatggccttgcagggcggtgtctgaggggcgggagctggatgtaaaactatgcggtcatttttcggtgggtggaaaaatgggaagaacaggcgtgggcgtggcccagctcggggtcagctgctgtgggcgcggccaagcacagggttgtaggtcaagtaacggggcaggggcggggctagcgtagcgtgggaggtgacaggtgtgggcaccccggtgtgggcgtggcccgcaaatgcggtggggacggggccgtgggcggggcatcacagtaggtgtggcctgtctcacgttccgcccctccccacgcagcacgctgagcgccgacgcgggtcccgagtgctatgagctgcaggtgtgcgtcaaggactactgcttcgcgcgcgaggaccgcacggtggggctggccgtgctgcagctgcgtgagctggcccagcgcgggagcgccgcctgctggctgccgctcggccgccgcatccacatggacgacacgggcctcacggtgctgcgaatcctctcgcagcgcagcaacgacgaggtggccaaggagttcgtgaagctcaagtcggacacgcgctccgccgaggagggcggtgccgcgcctgcgccttagcgcgggcggtcggccgagcggcactgcgcctgcgcggagggcgctgggcggggagggacggggcttgcgccttggtgggacctccccaggggcggggctcggggggctccacgccaagggtgggctgcgcctacgcccttgactcagctttcccttttggggaattaggaatggaggatgccccgccctctcgggaggccacgcccaagggcgcgacgaaggaaggagccacatccccaacttgaggccacgcccccagcacctagggggcattttgagctgggatgggggaaacctcgtccctatggaggaggccacatcccggggctctggtaccgggaggcaccacctcatgtcccctggaaaagccataagatgggacccagacccctgggaccccagaccaattgccaagtatggaaatctcagctccctcgagggggggccctgggcaaggggtagggctctctggagcgcccctctaggtggcctggggactggagggaccaggatgctggttggagggccccggaataccggagtccctttagatatttgtgcaaaaaataaatggggggaggggggaggatgggatttcaaaagcacatgcgcccttgggcgcccaaaccctgggggccgaggggacggctctggttccccacgctgcccctacttccctttgggagtttgcctctccctctcccccaacaaacccagtcctcatatcatagagttcaacacacccatttgacagatggcaaaactgaggcttaaagagctgcttgagacttggccaaggttccaggtgccataccctctgtgcccctcccttaggcctgtgtgccccatggaagggtgggctgagatcgggatgacctgacacagctccctattgctgctaattccccctcggcctcctccaaggggtgggaattccaggccaagacccctacttcgcctttccttctccggctgccaagcaggacctttgccctcagccctttctcctgggatctccatgggggatgccatgagggcctcccaccacaaaagagaatttgggatcccctggtcccaggtttctccatcccttcttccttttccagaattttccaaataggaaagaacagaaggagaccagaaactctaggggggagaaagagaatgagagaaagagaatgagagagagagaaacacaaacacagtgacacagtgagagcttagtctccaagagcctattcattgattcaaacacccaagccacaggatacctcagatggccctcttgccagctggaagctctttctccaatgagcaaagttacagtgacctggctggagttacctggtgcacataggaccttaggggaaagttcagcgtggactacacttgctctgggatctgcttttccacatgtgtgtatggcacgcctttttctgctggattgggaaggacaagattttgctgtgctagggagaaatgaaaacggggtgagctgagtagctgggtttctggaggatagaacatcagatggggaggctttccgaggtgaagaatgagagggaaccacttactagagagaaaagagctccaggcctggggaacagcacgtgcgaaggccaggagagaagaactgttgaaacaacgagaagggtggcacggctggagctgagccagcaagggggatcgtgaggagccttggggttggggagatctgcagaagcatcagaccaggcagggcctcgtacgcagtcctgaggagttttacttttattctaagacagttggggagctccaggagctgttttaagttggggagagactggattccagcctgcaaaagctgttttgtgaagactaaaaccagtgaggagaggtggaggtgctttggggacactgaaatggattcttggaaagattctgaaggctgtgttgaaaagacacctatagctgtggggacatgactataatcccagcatttggggagaccgaggctggcagatcacttaaggtcaggagtttgagaccagcctggccaacatggcgaaaccccatctctgctaaaaatacaaaaattagctgggtgcagtggtgcatgcctgtagtcccagctactcaggagactgaggcgggagaattgtttgaaccctggaggcagaggttgtagtgagtcgtgatcacacaactgcactccagcctgggcaacagaacaatactccattccctcccctctaccccaccaaaaaaaaaaaaaaatcctgcccttagatgagctctagggctgctgagtacagttgtcccagttgcacagtgcccaagggtttggcattgctaagaaggccacgtgcaaatcctagatattgagtgttgtatgtttgtgacgttggtttcccgacatgtgaatggcccaagtgtctggaagaagtggcgccactttctaatttgcttggagatgttgcatgtcccttaaattcagacaggtgcaggtaactggaggttctgaaccaaaggttaaaatgcaaattctcatacagggttgggaagttgtagccagggataagcttatgtgactgttatatggactgaggagcagatgtgaatttcgaaccatgacatggctgagggtaggggtcgggtggatggatgattcagggttgtaacccatagagcccaaaggggaagtgatctgtgacctggggtgagggtgatctggaagatttttggatggctggaaagaaatggggaagtcgagctgcctgagagagccaagttatttcccaaaagattccttaggagtctttctgttcaagacctccgtgtgtgtgtgtgtgtgtttagggttccccagcaatggcccaggcatgtgaaggaaacaagcttcttcagggaatatttgttgaatgagttttcctgactcccaggctagaactgtttttgcaatttccaccctcttttctttcccccagagaactcctattcgtccttcaaaacccatcacggaaacccctcttggagaaaaccctccttccttcccctcaggactttcccagccaccgtctctcctccagtccagcctgatgccatgggactgggggtttctctgtccagctctgtttctcccagactggggtctgaggactctcaggacccccaactttacctagcacaggctgggcacaagtgggtgacagggagtctacgcctagtggaattatgtattggggcagggtcagtgtgagaatacacatccgcatgcatgtctgtccatgtctgtccgtaccaaccttccccttccacacggacctgggcacataggaggtgtctgagcctgacacatgggacagagagtggacatggctgagacacggacagagaaaagacaaggagtccagggggctgaaagccttttgaaatcaggaagttcctgtattggcagaacaaagcccagagaggagcagggctttcctcaacgccacccagcaagtggacacagagcccggccttggatgacacctccagggttctgaaccctggacctcgctttatgcaaggagctggccccacatttccatgaatcggggaaacagcacaagaaggttggcctgtggcagggcaagggttaaaggggtgacattgagggatgcctcagagtcaaagtcccctgaccaagaggaatagagtagaaaacacagagacagagggtgagatcacgccccgatgaggacggagagagacagagatggagagagacatagaggtggaaatatacagagaaagataaatgcagagaccaaggcagggagtgtcgggggaagtaaagagggtgtcctgaagaaagaaggatctgttcactcttaccagtctgtcctcgaatgatttgcataaaatgaggaggtgcctgtccacacccccaattcctctctcaggccccagagcctgagacctcaccatgcccccatcagagatgcaaaaaactaaacacccaactagaaatccttgggacctctctcggctgggatctcagagcctttctgtcccctacccctaccccatgtgctgtcgattttgcagatggggacaacctggggcctcccggaactctgccaccctggggaagttgggggagggccttagtcccggatcacaaccccgtctgctccccagaatcctttcctaagaatcgttgaggaccaaagttgtctttgctgacacgtgttgcttttctctttgccttttattgtttcagagaaaaatcaagttgactgtgtcaagtaacaccccaccccttacccccgtccagccatagtggctctctggagacacaggtcacaggcggagggtcccctgatcatccccaaccacacagccagggggacttgacccctgtccacccctgtctcgtgctccctcagacccccacaaaccggccaagcagtccggggaggcttcccctccacacaactcttagcatgtgattgcagatgtgaaatcaaaacgttgtttgttttttgttttgttttgattctaccccgtcggtccagtgtctgcacagacgccttcatttctctgtaaatatgtgacttggaacaaatgtttaacacaaacgagaagtggtcatgaatgcatggtgttgagatgttttgcactattctgactttttggtctctgtaaaaatattttattaacagcagacattaaaaaaagaaaaaccacacacagccttggacacgtggttgcctcctccttgcattcctttatcagcaaaaaaacaaaaacaaaaacctcacgtacgattagcacctactaggtaggcgcagactcagtagaacacactgcttgcccatgaacgcggctcatccgcaactggagtcatccccattttacagagaaggaaactgaagtacagagagacaagatcttgctcagatcacatagccaggaagagatggagctgggacttgaactcagaacatttgcaaccattgctttttttttttttttttgagatgaagtctctgttgcccaggctggaatgcagtggtgcaatctcagctcactgcaatctccacctcccagattcaagcgattctcctgccttagcctcctgagtagctgggattacaggcgcccgccaccttgcctggctaatttttgtatttttagtagagataggatttcaccatgttggccaggctggtcgcgaacccctgacctcaggtgatccactccctcggcctcccaaagtgctgggattacaggcgtgagccaccgcacccggccatctgttgcccttaaggaagttaagatacaaacactaggaatacatgcccttaattcaacccacacccccatgcttgtttggttttgttgggttttttgggatcttcttgtttgtttgtttttgagacagggtcttgctctgtcacccaggatggagttcagtgtcacaatctcaactcactgcatcctcaacctcccaggctcaggtgatcctcccacctcagcctcctgagtagtgtgcaccaccacacctggctaatttgtgtattttttgtagtgataggatgtcgccatgttgcccagactgctctcgaactcctcactttgggcaatcctctctcctcagccctccaaagtgttgggattacaggcgtgagccactgtgcctggccatgtctgttttaaatgtagcagctggggccaggcgcagtggctcacgcctgtaatcccagcactttaggaggccgaggcgggtggatcacgaggtcaggagatcgagaccatcctggctaacacggtgaaaccccgtctctactaaaagtaccaaaaattagccgggcacggtggcaggcacctgtagttccagctactcgggaggctgaggcaggagaatggtgtgaactggggaggcggagcttgcagtgagccaagatcacgccactgcattccagcctgggtgacggagcgagactccatctcaaaaaaaaaaaaagaaaaaaaagtagcagctgggaatctcatttcataaactcagatgtgtgaggaatgaaactccattttccaacagctgaatttaatttctgttttgagtctccatcccacgaggaagcagaaatggaatctcattcagcccagtttcctcggtaaattccgaaattcccctccttatgtctggggttatttctacatttgagcggacaggacgggagctgcgggatccaccaccaggagtgggttcagtgagtgcttttggttgcaagtaacagacagcaggactaaaagtggggccagaaagtggcttacaccaggagttatccagcacgcagcaatcccgctcctgggggacttttctcctttgagaaacttgcacgtgggggtgtggtatcttctcaaagaatagcatatagctgggaaaaggggacaaaccgcagctgtctgcatgatgtctgcagaggcagcctgcaggtccttgagtgcccctgctcattagctgtttctgtacccaagtgcataggctacgcactgtgactgatgtggatctatttgcccctcgctacaaaagggtctcaagtcttgtccttcagtgtgtgggacccatcgtgttaccaatggggcttggggactgaggctcaagactgcttgctgggaaatgtaacccctttgttctggacaggtagaaggagaggagaatggtcatccaggcctaatgtaaagtttctgcaaccc

SEQ ID NO: 9 - DNA, 58617616 bp, Homo sapiens (residues 1-2,171,023 of 58,617,616)
  source 1..58617616: mol_type = genomic DNA
nnnnnnnnnnnnnnnnnnnnnnnnnnnnnnnnnnnnnnnnnnnnnnnnnnnnnnnnnnnnnnnnnnnnnnnnnnnnnnnnnnnnnnnnnnnnnnnnnnnnnnnnnnnnnnnnnnnnnnnnnnnnnnnnnnnnnnnnnnnnnnnnnnnnnnnnnnnnnnnnnnnnnnnnnnnnnnnnnnnnnnnnnnnnnnnnnnnnnnnnnnnnnnnnnnnnnnnnnnnnnnnnnnnnnnnnnnnnnnnnnnnnnnnnnnnnnnnnnnnnnnnnnnnnnnnnnnnnnnnnnnnnnnnnnnnnnnnnnnnnnnnnnnnnnnnnnnnnnnnnnnnnnnnnnnnnnnnnnnnnnnnnnnnnnnnnnnnnnnnnnnnnnnnnnnnnnnnnnnnnnnnnnnnnnnnnnnnnnnnnnnnnnnnnnnnnnnnnnnnnnnnnnnnnnnnnnnnnnnnnnnnnnnnnnnnnnnnnnnnnnnnnnnnnnnnnnnnnnnnnnnnnnnnnnnnnnnnnnnnnnnnnnnnnnnnnnnnnnnnnnnnnnnnnnnnnnnnnnnnnnnnnnnnnnnnnnnnnnnnnnnnnnnnnnnnnnnnnnnnnnnnnnnnnnnnnnnnnnnnnnnnnnnnnnnnnnnnnnnnnnnnnnnnnnnnnnnnnnnnnnnnnnnnnnnnnnnnnnnnnnnnnnnnnnnnnnnnnnnnnnnnnnnnnnnnnnnnnnnnnnnnnnnnnnnnnnnnnnnnnnnnnnnnnnnnnnnnnnnnnnnnnnnnnnnnnnnnnnnnnnnnnnnnnnnnnnnnnnnnnnnnnnnnnnnnnnnnnnnnnnnnnnnnnnnnnnnnnnnnnnnnnnnnnnnnnnnnnnnnnnnnnnnnnnnnnnnnnnnnnnnnnnnnnnnnnnnnnnnnnnnnnnnnnnnnnnnnnnnnnnnnnnnnnnnnnnnnnnnnnnnnnnnnnnnnnnnnnnnnnnnnnnnnnnnnnnnnnnnnnnnnnnnnnnnnnnnnnnnnnnnnnnnnnnnnnnnnnnnnnnnnnnnnnnnnnnnnnnnnnnnnnnnnnnnnnnnnnnnnnnnnnnnnnnnnnnnnnnnnnnnnnnnnnnnnnnnnnnnnnnnnnnnnnnnnnnnnnnnnnnnnnnnnnnnnnnnnnnnnnnnnnnnnnnnnnnnnnnnnnnnnnnnnnnnnnnnnnnnnnnnnnnnnnnnnnnnnnnnnnnnnnnnnnnnnnnnnnnnnnnnnnnnnnnnnnnnnnnnnnnnnnnnnnnnnnnnnnnnnnnnnnnnnnnnnnnnnnnnnnnnnnnnnnnnnnnnnnnnnnnnnnnnnnnnnnnnnnnnnnnnnnnnnnnnnnnnnnnnnnnnnnnnnnnnnnnnnnnnnnnnnnnnnnnnnnnnnnnnnnnnnnnnnnnnnnnnnnnnnnnnnnnnnnnnnnnnnnnnnnnnnnnnnnnnnnnnnnnnnnnnnnnnnnnnnnnnnnnnnnnnnnnnnnnnnnnnnnnnnnnnnnnnnnnnnnnnnnnnnnnnnnnnnnnnnnnnnnnnnnnnnnnnnnnnnnnnnnnnnnnnnnnnnnnnnnnnnnnnnnnnnnnnnnnnnnnnnnnnnnnnnnnnnnnnnnnnnnnnnnnnnnnnnnnnnnnnnnnnnnnnnnnnnnnnnnnnnnnnnnnnnnnnnnnnnnnnnnnnnnnnnnnnnnnnnnnnnnnnnnnnnnnnnnnnnnnnnnnnnnnnnnnnnnnnnnnnnnnnnnnnnnnnnnnnnnnnnnnnnnnnnnnnnnnnnnnnnnnnnnnnnnnnnnnnnnnnnnnnnnnnnnnnnnnnnnnnnnnnnnnnnnnnnnnnnnnnnnnnnnnnnnnnnnnnnnnnnnnnnnnnnnnnnnnnnnnnnnnnnnnnnnnnnnnnnnnnnnnnnnnnnnnnnnnnnnnnnnnnnnnnnnnnnnnnnnnnnnnnnnnnnnnnnnnnnnnnnnnnnnnnnnnnnnnnnnnnnnnnnnnnnnnnnnnnnnnnnnnnnnnnnnnnnnnnnnnnnnnnnnnnnnnnnnnnnnnnnnnnnnnnnnnnnnnnnnnnnnnnnnnnnnnnnnnnnnnnnnnnnnnnnnnnnnnnnnnnnnnnnnnnnnnnnnnnnnnnnnnnnnnnnnnnnnnnnnnnnnnnnnnnnnnnnnnnnnnnnnnnnnnnnnnnnnnnnnnnnnnnnnnnnnnnnnnnnnnnnnnnnnnnnnnnnnnnnnnnnnnnnnnnnnnnnnnnnnnnnnnnnnnnnnnnnnnnnnnnnnnnnnnnnnnnnnnnnnnnnnnnnnnnnnnnnnnnnnnnnnnnnnnnnnnnnnnnnnnnnnnnnnnnnnnnnnnnnnnnnnnnnnnnnnnnnnnnnnnnnnnnnnnnnnnnnnnnnnnnnnnnnnnnnnnnnnnnnnnnnnnnnnnnnnnnnnnnnnnnnnnnnnnnnnnnnnnnnnnnnnnnnnnnnnnnnnnnnnnnnnnnnnnnnnnnnnnnnnnnnnnnnnnnnnnnnnnnnnnnnnnnnnnnnnnnnnnnnnnnnnnnnnnnnnnnnnnnnnnnnnnnnnnnnnnnnnnnnnnnnnnnnnnnnnnnnnnnnnnnnnnnnnnnnnnnnnnnnnnnnnnnnnnnnnnnnnnnnnnnnnnnnnnnnnnnnnnnnnnnnnnnnnnnnnnnnnnnnnnnnnnnnnnnnnnnnnnnnnnnnnnnnnnnnnnnnnnnnnnnnnnnnnnnnnnnnnnnnnnnnnnnnnnnnnnnnnnnnnnnnnnnnnnnnnnnnnnnnnnnnnnnnnnnnnnnnnnnnnnnnnnnnnnnnnnnnnnnnnnnnnnnnnnnnnnnnnnnnnnnnnnnnnnnnnnnnnnnnnnnnnnnnnnnnnnnnnnnnnnnnnnnnnnnnnnnnnnnnnnnnnnnnnnnnnnnnnnnnnnnnnnnnnnnnnnnnnnnnnnnnnnnnnnnnnnnnnnnnnnnnnnnnnnnnnnnnnnnnnnnnnnnnnnnnnnnnnnnnnnnnnnnnnnnnnnnnnnnnnnnnnnnnnnnnnnnnnnnnnnnnnnnnnnnnnnnnnnnnnnnnnnnnnnnnnnnnnnnnnnnnnnnnnnnnnnnnnnnnnnnnnnnnnnnnnnnnnnnnnnnnnnnnnnnnnnnnnnnnnnnnnnnnnnnnnnnnnnnnnnnnnnnnnnnnnnnnnnnnnnnnnnnnnnnnnnnnnnnnnnnnnnnnnnnnnnnnnnnnnnnnnnnnnnnnnnnnnnnnnnnnnnnnnnnnnnnnnnnnnnnnnnnnnnnnnnnnnnnnnnnnnnnnnnnnnnnnnnnnnnnnnnnnnnnnnnnnnnnnnnnnnnnnnnnnnnnnnnnnnnnnnnnnnnnnnnnnnnnnnnnnnnnnnnnnnnnnnnnnnnnnnnnnnnnnnnnnnnnnnnnnnnnnnnnnnnnnnnnnnnnnnnnnnnnnnnnnnnnnnnnnnnnnnnnnnnnnnnnnnnnnnnnnnnnnnnnnnnnnnnnnnnnnnnnnnnnnnnnnnnnnnnnnnnnnnnnnnnnnnnnnnnnnnnnnnnnnnnnnnnnnnnnnnnnnnnnnnnnnnnnnnnnnnnnnnnnnnnnnnnnnnnnnnnnnnnnnnnnnnnnnnnnnnnnnnnnnnnnnnnnnnnnnnnnnnnnnnnnnnnnnnnnnnnnnnnnnnnnnnnnnnnnnnnnnnnnnnnnnnnnnnnnnnnnnnnnnnnnnnnnnnnnnnnnnnnnnnnnnnnnnnnnnnnnnnnnnnnnnnnnnnnnnnnnnnnnnnnnnnnnnnnnnnnnnnnnnnnnnnnnnnnnnnnnnnnnnnnnnnnnnnnnnnnnnnnnnnnnnnnnnnnnnnnnnnnnnnnnnnnnnnnnnnnnnnnnnnnnnnnnnnnnnnnnnnnnnnnnnnnnnnnnnnnnnnnnnnnnnnnnnnnnnnnnnnnnnnnnnnnnnnnnnnnnnnnnnnnnnnnnnnnnnnnnnnnnnnnnnnnnnnnnnnnnnnnnnnnnnnnnnnnnnnnnnnnnnnnnnnnnnnnnnnnnnnnnnnnnnnnnnnnnnnnnnnnnnnnnnnnnnnnnnnnnnnnnnnnnnnnnnnnnnnnnnnnnnnnnnnnnnnnnnnnnnnnnnnnnnnnnnnnnnnnnnnnnnnnnnnnnnnnnnnnnnnnnnnnnnnnnnnnnnnnnnnnnnnnnnnnnnnnnnnnnnnnnnnnnnnnnnnnnnnnnnnnnnnnnnnnnnnnnnnnnnnnnnnnnnnnnnnnnnnnnnnnnnnnnnnnnnnnnnnnnnnnnnnnnnnnnnnnnnnnnnnnnnnnnnnnnnnnnnnnnnnnnnnnnnnnnnnnnnnnnnnnnnnnnnnnnnnnnnnnnnnnnnnnnnnnnnnnnnnnnnnnnnnnnnnnnnnnnnnnnnnnnnnnnnnnnnnnnnnnnnnnnnnnnnnnnnnnnnnnnnnnnnnnnnnnnnnnnnnnnnnnnnnnnnnnnnnnnnnnnnnnnnnnnnnnnnnnnnnnnnnnnnnnnnnnnnnnnnnnnnnnnnnnnnnnnnnnnnnnnnnnnnnnnnnnnnnnnnnnnnnnnnnnnnnnnnnnnnnnnnnnnnnnnnnnnnnnnnnnnnnnnnnnnnnnnnnnnnnnnnnnnnnnnnnnnnnnnnnnnnnnnnnnnnnnnnnnnnnnnnnnnnnnnnnnnnnnnnnnnnnnnnnnnnnnnnnnnnnnnnnnnnnnnnnnnnnnnnnnnnnnnnnnnnnnnnnnnnnnnnnnnnnnnnnnnnnnnnnnnnnnnnnnnnnnnnnnnnnnnnnnnnnnnnnnnnnnnnnnnnnnnnnnnnnnnnnnnnnnnnnnnnnnnnnnnnnnnnnnnnnnnnnnnnnnnnnnnnnnnnnnnnnnnnnnnnnnnnnnnnnnnnnnnnnnnnnnnnnnnnnnnnnnnnnnnnnnnnnnnnnnnnnnnnnnnnnnnnnnnnnnnnnnnnnnnnnnnnnnnnnnnnnnnnnnnnnnnnnnnnnnnnnnnnnnnnnnnnnnnnnnnnnnnnnnnnnnnnnnnnnnnnnnnnnnnnnnnnnnnnnnnnnnnnnnnnnnnnnnnnnnnnnnnnnnnnnnnnnnnnnnnnnnnnnnnnnnnnnnnnnnnnnnnnnnnnnnnnnnnnnnnnnnnnnnnnnnnnnnnnnnnnnnnnnnnnnnnnnnnnnnnnnnnnnnnnnnnnnnnnnnnnnnnnnnnnnnnnnnnnnnnnnnnnnnnnnnnnnnnnnnnnnnnnnnnnnnnnnnnnnnnnnnnnnnnnnnnnnnnnnnnnnnnnnnnnnnnnnnnnnnnnnnnnnnnnnnnnnnnnnnnnnnnnnnnnnnnnnnnnnnnnnnnnnnnnnnnnnnnnnnnnnnnnnnnnnnnnnnnnnnnnnnnnnnnnnnnnnnnnnnnnnnnnnnnnnnnnnnnnnnnnnnnnnnnnnnnnnnnnnnnnnnnnnnnnnnnnnnnnnnnnnnnnnnnnnnnnnnnnnnnnnnnnnnnnnnnnnnnnnnnnnnnnnnnnnnnnnnnnnnnnnnnnnnnnnnnnnnnnnnnnnnnnnnnnnnnnnnnnnnnnnnnnnnnnnnnnnnnnnnnnnnnnnnnnnnnnnnnnnnnnnnnnnnnnnnnnnnnnnnnnnnnnnnnnnnnnnnnnnnnnnnnnnnnnnnnnnnnnnnnnnnnnnnnnnnnnnnnnnnnnnnnnnnnnnnnnnnnnnnnnnnnnnnnnnnnnnnnnnnnnnnnnnnnnnnnnnnnnnnnnnnnnnnnnnnnnnnnnnnnnnnnnnnnnnnnnnnnnnnnnnnnnnnnnnnnnnnnnnnnnnnnnnnnnnnnnnnnnnnnnnnnnnnnnnnnnnnnnnnnnnnnnnnnnnnnnnnnnnnnnnnnnnnnnnnnnnnnnnnnnnnnnnnnnnnnnnnnnnnnnnnnnnnnnnnnnnnnnnnnnnnnnnnnnnnnnnnnnnnnnnnnnnnnnnnnnnnnnnnnnnnnnnnnnnnnnnnnnnnnnnnnnnnnnnnnnnnnnnnnnnnnnnnnnnnnnnnnnnnnnnnnnnnnnnnnnnnnnnnnnnnnnnnnnnnnnnnnnnnnnnnnnnnnnnnnnnnnnnnnnnnnnnnnnnnnnnnnnnnnnnnnnnnnnnnnnnnnnnnnnnnnnnnnnnnnnnnnnnnnnnnnnnnnnnnnnnnnnnnnnnnnnnnnnnnnnnnnnnnnnnnnnnnnnnnnnnnnnnnnnnnnnnnnnnnnnnnnnnnnnnnnnnnnnnnnnnnnnnnnnnnnnnnnnnnnnnnnnnnnnnnnnnnnnnnnnnnnnnnnnnnnnnnnnnnnnnnnnnnnnnnnnnnnnnnnnnnnnnnnnnnnnnnnnnnnnnnnnnnnnnnnnnnnnnnnnnnnnnnnnnnnnnnnnnnnnnnnnnnnnnnnnnnnnnnnnnnnnnnnnnnnnnnnnnnnnnnnnnnnnnnnnnnnnnnnnnnnnnnnnnnnnnnnnnnnnnnnnnnnnnnnnnnnnnnnnnnnnnnnnnnnnnnnnnnnnnnnnnnnnnnnnnnnnnnnnnnnnnnnnnnnnnnnnnnnnnnnnnnnnnnnnnnnnnnnnnnnnnnnnnnnnnnnnnnnnnnnnnnnnnnnnnnnnnnnnnnnnnnnnnnnnnnnnnnnnnnnnnnnnnnnnnnnnnnnnnnnnnnnnnnnnnnnnnnnnnnnnnnnnnnnnnnnnnnnnnnnnnnnnnnnnnnnnnnnnnnnnnnnnnnnnnnnnnnnnnnnnnnnnnnnnnnnnnnnnnnnnnnnnnnnnnnnnnnnnnnnnnnnnnnnnnnnnnnnnnnnnnnnnnnnnnnnnnnnnnnnnnnnnnnnnnnnnnnnnnnnnnnnnnnnnnnnnnnnnnnnnnnnnnnnnnnnnnnnnnnnnnnnnnnnnnnnnnnnnnnnnnnnnnnnnnnnnnnnnnnnnnnnnnnnnnnnnnnnnnnnnnnnnnnnnnnnnnnnnnnnnnnnnnnnnnnnnnnnnnnnnnnnnnnnnnnnnnnnnnnnnnnnnnnnnnnnnnnnnnnnnnnnnnnnnnnnnnnnnnnnnnnnnnnnnnnnnnnnnnnnnnnnnnnnnnnnnnnnnnnnnnnnnnnnnnnnnnnnnnnnnnnnnnnnnnnnnnnnnnnnnnnnnnnnnnnnnnnnnnnnnnnnnnnnnnnnnnnnnnnnnnnnnnnnnnnnnnnnnnnnnnnnnnnnnnnnnnnnnnnnnnnnnnnnnnnnnnnnnnnnnnnnnnnnnnnnnnnnnnnnnnnnnnnnnnnnnnnnnnnnnnnnnnnnnnnnnnnnnnnnnnnnnnnnnnnnnnnnnnnnnnnnnnnnnnnnnnnnnnnnnnnnnnnnnnnnnnnnnnnnnnnnnnnnnnnnnnnnnnnnnnnnnnnnnnnnnnnnnnnnnnnnnnnnnnnnnnnnnnnnnnnnnnnnnnnnnnnnnnnnnnnnnnnnnnnnnnnnnnnnnnnnnnnnnnnnnnnnnnnnnnnnnnnnnnnnnnnnnnnnnnnnnnnnnnnnnnnnnnnnnnnnnnnnnnnnnnnnnnnnnnnnnnnnnnnnnnnnnnnnnnnnnnnnnnnnnnnnnnnnnnnnnnnnnnnnnnnnnnnnnnnnnnnnnnnnnnnnnnnnnnnnnnnnnnnnnnnnnnnnnnnnnnnnnnnnnnnnnnnnnnnnnnnnnnnnnnnnnnnnnnnnnnnnnnnnnnnnnnnnnnnnnnnnnnnnnnnnnnnnnnnnnnnnnnnnnnnnnnnnnnnnnnnnnnnnnnnnnnnnnnnnnnnnnnnnnnnnnnnnnnnnnnnnnnnnnnnnnnnnnnnnnnnnnnnnnnnnnnnnnnnnnnnnnnnnnnnnnnnnnnnnnnnnnnnnnnnnnnnnnnnnnnnnnnnnnnnnnnnnnnnnnnnnnnnnnnnnnnnnnnnnnnnnnnnnnnnnnnnnnnnnnnnnnnnnnnnnnnnnnnnnnnnnnnnnnnnnnnnnnnnnnnnnnnnnnnnnnnnnnnnnnnnnnnnnnnnnnnnnnnnnnnnnnnnnnnnnnnnnnnnnnnnnnnnnnnnnnnnnnnnnnnnnnnnnnnnnnnnnnnnnnnnnnnnnnnnnnnnnnnnnnnnnnnnnnnnnnnnnnnnnnnnnnnnnnnnnnnnnnnnnnnnnnnnnnnnnnnnnnnnnnnnnnnnnnnnnnnnnnnnnnnnnnnnnnnnnnnnnnnnnnnnnnnnnnnnnnnnnnnnnnnnnnnnnnnnnnnnnnnnnnnnnnnnnnnnnnnnnnnnnnnnnnnnnnnnnnnnnnnnnnnnnnnnnnnnnnnnnnnnnnnnnnnnnnnnnnnnnnnnnnnnnnnnnnnnnnnnnnnnnnnnnnnnnnnnnnnnnnnnnnnnnnnnnnnnnnnnnnnnnnnnnnnnnnnnnnnnnnnnnnnnnnnnnnnnnnnnnnnnnnnnnnnnnnnnnnnnnnnnnnnnnnnnnnnnnnnnnnnnnnnnnnnnnnnnnnnnnnnnnnnnnnnnnnnnnnnnnnnnnnnnnnnnnnnnnnnnnnnnnnnnnnnnnnnnnnnnnnnnnnnnnnnnnnnnnnnnnnnnnnnnnnnnnnnnnnnnnnnnnnnnnnnnnnnnnnnnnnnnnnnnnnnnnnnnnnnnnnnnnnnnnnnnnnnnnnnnnnnnnnnnnnnnnnnnnnnnnnnnnnnnnnnnnnnnnnnnnnnnnnnnnnnnnnnnnnnnnnnnnnnnnnnnnnnnnnnnnnnnnnnnnnnnnnnnnnnnnnnnnnnnnnnnnnnnnnnnnnnnnnnnnnnnnnnnnnnnnnnnnnnnnnnnnnnnnnnnnnnnnnnnnnnnnnnnnnnnnnnnnnnnnnnnnnnnnnnnnnnnnnnnnnnnnnnnnnnnnnnnnnnnnnnnnnnnnnnnnnnnnnnnnnnnnnnnnnnnnnnnnnnnnnnnnnnnnnnnnnnnnnnnnnnnnnnnnnnnnnnnnnnnnnnnnnnnnnnnnnnnnnnnnnnnnnnnnnnnnnnnnnnnnnnnnnnnnnnnnnnnnnnnnnnnnnnnnnnnnnnnnnnnnnnnnnnnnnnnnnnnnnnnnnnnnnnnnnnnnnnnnnnnnnnnnnnnnnnnnnnnnnnnnnnnnnnnnnnnnnnnnnnnnnnnnnnnnnnnnnnnnnnnnnnnnnnnnnnnnnnnnnnnnnnnnnnnnnnnnnnnnnnnnnnnnnnnnnnnnnnnnnnnnnnnnnnnnnnnnnnnnnnnnnnnnnnnnnnnnnnnnnnnnnnnnnnnnnnnnnnnnnnnnnnnnnnnnnnnnnnnnnnnnnnnnnnnnnnnnnnnnnnnnnnnnnnnnnnnnnnnnnnnnnnnnnnnnnnnnnnnnnnnnnnnnnnnnnnnnnnnnnnnnnnnnnnnnnnnnnnnnnnnnnnnnnnnnnnnnnnnnnnnnnnnnnnnnnnnnnnnnnnnnnnnnnnnnnnnnnnnnnnnnnnnnnnnnnnnnnnnnnnnnnnnnnnnnnnnnnnnnnnnnnnnnnnnnnnnnnnnnnnnnnnnnnnnnnnnnnnnnnnnnnnnnnnnnnnnnnnnnnnnnnnnnnnnnnnnnnnnnnnnnnnnnnnnnnnnnnnnnnnnnnnnnnnnnnnnnnnnnnnnnnnnnnnnnnnnnnnnnnnnnnnnnnnnnnnnnnnnnnnnnnnnnnnnnnnnnnnnnnnnnnnnnnnnnnnnnnnnnnnnnnnnnnnnnnnnnnnnnnnnnnnnnnnnnnnnnnnnnnnnnnnnnnnnnnnnnnnnnnnnnnnnnnnnnnnnnnnnnnnnnnnnnnnnnnnnnnnnnnnnnnnnnnnnnnnnnnnnnnnnnnnnnnnnnnnnnnnnnnnnnnnnnnnnnnnnnnnnnnnnnnnnnnnnnnnnnnnnnnnnnnnnnnnnnnnnnnnnnnnnnnnnnnnnnnnnnnnnnnnnnnnnnnnnnnnnnnnnnnnnnnnnnnnnnnnnnnnnnnnnnnnnnnnnnnnnnnnnnnnnnnnnnnnnnnnnnnnnnnnnnnnnnnnnnnnnnnnnnnnnnnnnnnnnnnnnnnnnnnnnnnnnnnnnnnnnnnnnnnnnnnnnnnnnnnnnnnnnnnnnnnnnnnnnnnnnnnnnnnnnnnnnnnnnnnnnnnnnnnnnnnnnnnnnnnnnnnnnnnnnnnnnnnnnnnnnnnnnnnnnnnnnnnnnnnnnnnnnnnnnnnnnnnnnnnnnnnnnnnnnnnnnnnnnnnnnnnnnnnnnnnnnnnnnnnnnnnnnnnnnnnnnnnnnnnnnnnnnnnnnnnnnnnnnnnnnnnnnnnnnnnnnnnnnnnnnnnnnnnnnnnnnnnnnnnnnnnnnnnnnnnnnnnnnnnnnnnnnnnnnnnnnnnnnnnnnnnnnnnnnnnnnnnnnnnnnnnnnnnnnnnnnnnnnnnnnnnnnnnnnnnnnnnnnnnnnnnnnnnnnnnnnnnnnnnnnnnnnnnnnnnnnnnnnnnnnnnnnnnnnnnnnnnnnnnnnnnnnnnnnnnnnnnnnnnnnnnnnnnnnnnnnnnnnnnnnnnnnnnnnnnnnnnnnnnnnnnnnnnnnnnnnnnnnnnnnnnnnnnnnnnnnnnnnnnnnnnnnnnnnnnnnnnnnnnnnnnnnnnnnnnnnnnnnnnnnnnnnnnnnnnnnnnnnnnnnnnnnnnnnnnnnnnnnnnnnnnnnnnnnnnnnnnnnnnnnnnnnnnnnnnnnnnnnnnnnnnnnnnnnnnnnnnnnnnnnnnnnnnnnnnnnnnnnnnnnnnnnnnnnnnnnnnnnnnnnnnnnnnnnnnnnnnnnnnnnnnnnnnnnnnnnnnnnnnnnnnnnnnnnnnnnnnnnnnnnnnnnnnnnnnnnnnnnnnnnnnnnnnnnnnnnnnnnnnnnnnnnnnnnnnnnnnnnnnnnnnnnnnnnnnnnnnnnnnnnnnnnnnnnnnnnnnnnnnnnnnnnnnnnnnnnnnnnnnnnnnnnnnnnnnnnnnnnnnnnnnnnnnnnnnnnnnnnnnnnnnnnnnnnnnnnnnnnnnnnnnnnnnnnnnnnnnnnnnnnnnnnnnnnnnnnnnnnnnnnnnnnnnnnnnnnnnnnnnnnnnnnnnnnnnnnnnnnnnnnnnnnnnnnnnnnnnnnnnnnnnnnnnnnnnnnnnnnnnnnnnnnnnnnnnnnnnnnnnnnnnnnnnnnnnnnnnnnnnnnnnnnnnnnnnnnnnnnnnnnnnnnnnnnnnnnnnnnnnnnnnnnnnnnnnnnnnnnnnnnnnnnnnnnnnnnnnnnnnnnnnnnnnnnnnnnnnnnnnnnnnnnnnnnnnnnnnnnnnnnnnnnnnnnnnnnnnnnnnnnnnnnnnnnnnnnnnnnnnnnnnnnnnnnnnnnnnnnnnnnnnnnnnnnnnnnnnnnnnnnnnnnnnnnnnnnnnnnnnnnnnnnnnnnnnnnnnnnnnnnnnnnnnnnnnnnnnnnnnnnnnnnnnnnnnnnnnnnnnnnnnnnnnnnnnnnnnnnnnnnnnnnnnnnnnnnnnnnnnnnnnnnnnnnnnnnnnnnnnnnnnnnnnnnnnnnnnnnnnnnnnnnnnnnnnnnnnnnnnnnnnnnnnnnnnnnnnnnnnnnnnnnnnnnnnnnnnnnnnnnnnnnnnnnnnnnnnnnnnnnnnnnnnnnnnnnnnnnnnnnnnnnnnnnnnnnnnnnnnnnnnnnnnnnnnnnnnnnnnnnnnnnnnnnnnnnnnnnnnnnnnnnnnnnnnnnnnnnnnnnnnnnnnnnnnnnnnnnnnnnnnnnnnnnnnnnnnnnnnnnnnnnnnnnnnnnnnnnnnnnnnnnnnnnnnnnnnnnnnnnnnnnnnnnnnnnnnnnnnnnnnnnnnnnnnnnnnnnnnnnnnnnnnnnnnnnnnnnnnnnnnnnnnnnnnnnnnnnnnnnnnnnnnnnnnnnnnnnnnnnnnnnnnnnnnnnnnnnnnnnnnnnnnnnnnnnnnnnnnnnnnnnnnnnnnnnnnnnnnnnnnnnnnnnnnnnnnnnnnnnnnnnnnnnnnnnnnnnnnnnnnnnnnnnnnnnnnnnnnnnnnnnnnnnnnnnnnnnnnnnnnnnnnnnnnnnnnnnnnnnnnnnnnnnnnnnnnnnnnnnnnnnnnnnnnnnnnnnnnnnnnnnnnnnnnnnnnnnnnnnnnnnnnnnnnnnnnnnnnnnnnnnnnnnnnnnnnnnnnnnnnnnnnnnnnnnnnnnnnnnnnnnnnnnnnnnnnnnnnnnnnnnnnnnnnnnnnnnnnnnnnnnnnnnnnnnnnnnnnnnnnnnnnnnnnnnnnnnnnnnnnnnnnnnnnnnnnnnnnnnnnnnnnnnnnnnnnnnnnnnnnnnnnnnnnnnnnnnnnnnnnnnnnnnnnnnnnnnnnnnnnnnnnnnnnnnnnnnnnnnnnnnnnnnnnnnnnnnnnnnnnnnnnnnnnnnnnnnnnnnnnnnnnnnnnnnnnnnnnnnnnnnnnnnnnnnnnnnnnnnnnnnnnnnnnnnnnnnnnnnnnnnnnnnnnnnnnnnnnnnnnnnnnnnnnnnnnnnnnnnnnnnnnnnnnnnnnnnnnnnnnnnnnnnnnnnnnnnnnnnnnnnnnnnnnnnnnnnnnnnnnnnnnnnnnnnnnnnnnnnnnnnnnnnnnnnnnnnnnnnnnnnnnnnnnnnnnnnnnnnnnnnnnnnnnnnnnnnnnnnnnnnnnnnnnnnnnnnnnnnnnnnnnnnnnnnnnnnnnnnnnnnnnnnnnnnnnnnnnnnnnnnnnnnnnnnnnnnnnnnnnnnnnnnnnnnnnnnnnnnnnnnnnnnnnnnnnnnnnnnnnnnnnnnnnnnnnnnnnnnnnnnnnnnnnnnnnnnnnnnnnnnnnnnnnnnnnnnnnnnnnnnnnnnnnnnnnnnnnnnnnnnnnnnnnnnnnnnnnnnnnnnnnnnnnnnnnnnnnnnnnnnnnnnnnnnnnnnnnnnnnnnnnnnnnnnnnnnnnnnnnnnnnnnnnnnnnnnnnnnnnnnnnnnnnnnnnnnnnnnnnnnnnnnnnnnnnnnnnnnnnnnnnnnnnnnnnnnnnnnnnnnnnnnnnnnnnnnnnnnnnnnnnnnnnnnnnnnnnnnnnnnnnnnnnnnnnnnnnnnnnnnnnnnnnnnnnnnnnnnnnnnnnnnnnnnnnnnnnnnnnnnnnnnnnnnnnnnnnnnnnnnnnnnnnnnnnnnnnnnnnnnnnnnnnnnnnnnnnnnnnnnnnnnnnnnnnnnnnnnnnnnnnnnnnnnnnnnnnnnnnnnnnnnnnnnnnnnnnnnnnnnnnnnnnnnnnnnnnnnnnnnnnnnnnnnnnnnnnnnnnnnnnnnnnnnnnnnnnnnnnnnnnnnnnnnnnnnnnnnnnnnnnnnnnnnnnnnnnnnnnnnnnnnnnnnnnnnnnnnnnnnnnnnnnnnnnnnnnnnnnnnnnnnnnnnnnnnnnnnnnnnnnnnnnnnnnnnnnnnnnnnnnnnnnnnnnnnnnnnnnnnnnnnnnnnnnnnnnnnnnnnnnnnnnnnnnnnnnnnnnnnnnnnnnnnnnnnnnnnnnnnnnnnnnnnnnnnnnnnnnnnnnnnnnnnnnnnnnnnnnnnnnnnnnnnnnnnnnnnnnnnnnnnnnnnnnnnnnnnnnnnnnnnnnnnnnnnnnnnnnnnnnnnnnnnnnnnnnnnnnnnnnnnnnnnnnnnnnnnnnnnnnnnnnnnnnnnnnnnnnnnnnnnnnnnnnnnnnnnnnnnnnnnnnnnnnnnnnnnnnnnnnnnnnnnnnnnnnnnnnnnnnnnnnnnnnnnnnnnnnnnnnnnnnnnnnnnnnnnnnnnnnnnnnnnnnnnnnnnnnnnnnnnnnnnnnnnnnnnnnnnnnnnnnnnnnnnnnnnnnnnnnnnnnnnnnnnnnnnnnnnnnnnnnnnnnnnnnnnnnnnnnnnnnnnnnnnnnnnnnnnnnnnnnnnnnnnnnnnnnnnnnnnnnnnnnnnnnnnnnnnnnnnnnnnnnnnnnnnnnnnnnnnnnnnnnnnnnnnnnnnnnnnnnnnnnnnnnnnnnnnnnnnnnnnnnnnnnnnnnnnnnnnnnnnnnnnnnnnnnnnnnnnnnnnnnnnnnnnnnnnnnnnnnnnnnnnnnnnnnnnnnnnnnnnnnnnnnnnnnnnnnnnnnnnnnnnnnnnnnnnnnnnnnnnnnnnnnnnnnnnnnnnnnnnnnnnnnnnnnnnnnnnnnnnnnnnnnnnnnnnnnnnnnnnnnnnnnnnnnnnnnnnnnnnnnnnnnnnnnnnnnnnnnnnnnnnnnnnnnnnnnnnnnnnnnnnnnnnnnnnnnnnnnnnnnnnnnnnnnnnnnnnnnnnnnnnnnnnnnnnnnnnnnnnnnnnnnnnnnnnnnnnnnnnnnnnnnnnnnnnnnnnnnnnnnnnnnnnnnnnnnnnnnnnnnnnnnnnnnnnnnnnnnnnnnnnnnnnnnnnnnnnnnnnnnnnnnnnnnnnnnnnnnnnnnnnnnnnnnnnnnnnnnnnnnnnnnnnnnnnnnnnnnnnnnnnnnnnnnnnnnnnnnnnnnnnnnnnnnnnnnnnnnnnnnnnnnnnnnnnnnnnnnnnnnnnnnnnnnnnnnnnnnnnnnnnnnnnnnnnnnnnnnnnnnnnnnnnnnnnnnnnnnnnnnnnnnnnnnnnnnnnnnnnnnnnnnnnnnnnnnnnnnnnnnnnnnnnnnnnnnnnnnnnnnnnnnnnnnnnnnnnnnnnnnnnnnnnnnnnnnnnnnnnnnnnnnnnnnnnnnnnnnnnnnnnnnnnnnnnnnnnnnnnnnnnnnnnnnnnnnnnnnnnnnnnnnnnnnnnnnnnnnnnnnnnnnnnnnnnnnnnnnnnnnnnnnnnnnnnnnnnnnnnnnnnnnnnnnnnnnnnnnnnnnnnnnnnnnnnnnnnnnnnnnnnnnnnnnnnnnnnnnnnnnnnnnnnnnnnnnnnnnnnnnnnnnnnnnnnnnnnnnnnnnnnnnnnnnnnnnnnnnnnnnnnnnnnnnnnnnnnnnnnnnnnnnnnnnnnnnnnnnnnnnnnnnnnnnnnnnnnnnnnnnnnnnnnnnnnnnnnnnnnnnnnnnnnnnnnnnnnnnnnnnnnnnnnnnnnnnnnnnnnnnnnnnnnnnnnnnnnnnnnnnnnnnnnnnnnnnnnnnnnnnnnnnnnnnnnnnnnnnnnnnnnnnnnnnnnnnnnnnnnnnnnnnnnnnnnnnnnnnnnnnnnnnnnnnnnnnnnnnnnnnnnnnnnnnnnnnnnnnnnnnnnnnnnnnnnnnnnnnnnnnnnnnnnnnnnnnnnnnnnnnnnnnnnnnnnnnnnnnnnnnnnnnnnnnnnnnnnnnnnnnnnnnnnnnnnnnnnnnnnnnnnnnnnnnnnnnnnnnnnnnnnnnnnnnnnnnnnnnnnnnnnnnnnnnnnnnnnnnnnnnnnnnnnnnnnnnnnnnnnnnnnnnnnnnnnnnnnnnnnnnnnnnnnnnnnnnnnnnnnnnnnnnnnnnnnnnnnnnnnnnnnnnnnnnnnnnnnnnnnnnnnnnnnnnnnnnnnnnnnnnnnnnnnnnnnnnnnnnnnnnnnnnnnnnnnnnnnnnnnnnnnnnnnnnnnnnnnnnnnnnnnnnnnnnnnnnnnnnnnnnnnnnnnnnnnnnnnnnnnnnnnnnnnnnnnnnnnnnnnnnnnnnnnnnnnnnnnnnnnnnnnnnnnnnnnnnnnnnnnnnnnnnnnnnnnnnnnnnnnnnnnnnnnnnnnnnnnnnnnnnnnnnnnnnnnnnnnnnnnnnnnnnnnnnnnnnnnnnnnnnnnnnnnnnnnnnnnnnnnnnnnnnnnnnnnnnnnnnnnnnnnnnnnnnnnnnnnnnnnnnnnnnnnnnnnnnnnnnnnnnnnnnnnnnnnnnnnnnnnnnnnnnnnnnnnnnnnnnnnnnnnnnnnnnnnnnnnnnnnnnnnnnnnnnnnnnnnnnnnnnnnnnnnnnnnnnnnnnnnnnnnnnnnnnnnnnnnnnnnnnnnnnnnnnnnnnnnnnnnnnnnnnnnnnnnnnnnnnnnnnnnnnnnnnnnnnnnnnnnnnnnnnnnnnnnnnnnnnnnnnnnnnnnnnnnnnnnnnnnnnnnnnnnnnnnnnnnnnnnnnnnnnnnnnnnnnnnnnnnnnnnnnnnnnnnnnnnnnnnnnnnnnnnnnnnnnnnnnnnnnnnnnnnnnnnnnnnnnnnnnnnnnnnnnnnnnnnnnnnnnnnnnnnnnnnnnnnnnnnnnnnnnnnnnnnnnnnnnnnnnnnnnnnnnnnnnnnnnnnnnnnnnnnnnnnnnnnnnnnnnnnnnnnnnnnnnnnnnnnnnnnnnnnnnnnnnnnnnnnnnnnnnnnnnnnnnnnnnnnnnnnnnnnnnnnnnnnnnnnnnnnnnnnnnnnnnnnnnnnnnnnnnnnnnnnnnnnnnnnnnnnnnnnnnnnnnnnnnnnnnnnnnnnnnnnnnnnnnnnnnnnnnnnnnnnnnnnnnnnnnnnnnnnnnnnnnnnnnnnnnnnnnnnnnnnnnnnnnnnnnnnnnnnnnnnnnnnnnnnnnnnnnnnnnnnnnnnnnnnnnnnnnnnnnnnnnnnnnnnnnnnnnnnnnnnnnnnnnnnnnnnnnnnnnnnnnnnnnnnnnnnnnnnnnnnnnnnnnnnnnnnnnnnnnnnnnnnnnnnnnnnnnnnnnnnnnnnnnnnnnnnnnnnnnnnnnnnnnnnnnnnnnnnnnnnnnnnnnnnnnnnnnnnnnnnnnnnnnnnnnnnnnnnnnnnnnnnnnnnnnnnnnnnnnnnnnnnnnnnnnnnnnnnnnnnnnnnnnnnnnnnnnnnnnnnnnnnnnnnnnnnnnnnnnnnnnnnnnnnnnnnnnnnnnnnnnnnnnnnnnnnnnnnnnnnnnnnnnnnnnnnnnnnnnnnnnnnnnnnnnnnnnnnnnnnnnnnnnnnnnnnnnnnnnnnnnnnnnnnnnnnnnnnnnnnnnnnnnnnnnnnnnnnnnnnnnnnnnnnnnnnnnnnnnnnnnnnnnnnnnnnnnnnnnnnnnnnnnnnnnnnnnnnnnnnnnnnnnnnnnnnnnnnnnnnnnnnnnnnnnnnnnnnnnnnnnnnnnnnnnnnnnnnnnnnnnnnnnnnnnnnnnnnnnnnnnnnnnnnnnnnnnnnnnnnnnnnnnnnnnnnnnnnnnnnnnnnnnnnnnnnnnnnnnnnnnnnnnnnnnnnnnnnnnnnnnnnnnnnnnnnnnnnnnnnnnnnnnnnnnnnnnnnnnnnnnnnnnnnnnnnnnnnnnnnnnnnnnnnnnnnnnnnnnnnnnnnnnnnnnnnnnnnnnnnnnnnnnnnnnnnnnnnnnnnnnnnnnnnnnnnnnnnnnnnnnnnnnnnnnnnnnnnnnnnnnnnnnnnnnnnnnnnnnnnnnnnnnnnnnnnnnnnnnnnnnnnnnnnnnnnnnnnnnnnnnnnnnnnnnnnnnnnnnnnnnnnnnnnnnnnnnnnnnnnnnnnnnnnnnnnnnnnnnnnnnnnnnnnnnnnnnnnnnnnnnnnnnnnnnnnnnnnnnnnnnnnnnnnnnnnnnnnnnnnnnnnnnnnnnnnnnnnnnnnnnnnnnnnnnnnnnnnnnnnnnnnnnnnnnnnnnnnnnnnnnnnnnnnnnnnnnnnnnnnnnnnnnnnnnnnnnnnnnnnnnnnnnnnnnnnnnnnnnnnnnnnnnnnnnnnnnnnnnnnnnnnnnnnnnnnnnnnnnnnnnnnnnnnnnnnnnnnnnnnnnnnnnnnnnnnnnnnnnnnnnnnnnnnnnnnnnnnnnnnnnnnnnnnnnnnnnnnnnnnnnnnnnnnnnnnnnnnnnnnnnnnnnnnnnnnnnnnnnnnnnnnnnnnnnnnnnnnnnnnnnnnnnnnnnnnnnnnnnnnnnnnnnnnnnnnnnnnnnnnnnnnnnnnnnnnnnnnnnnnnnnnnnnnnnnnnnnnnnnnnnnnnnnnnnnnnnnnnnnnnnnnnnnnnnnnnnnnnnnnnnnnnnnnnnnnnnnnnnnnnnnnnnnnnnnnnnnnnnnnnnnnnnnnnnnnnnnnnnnnnnnnnnnnnnnnnnnnnnnnnnnnnnnnnnnnnnnnnnnnnnnnnnnnnnnnnnnnnnnnnnnnnnnnnnnnnnnnnnnnnnnnnnnnnnnnnnnnnnnnnnnnnnnnnnnnnnnnnnnnnnnnnnnnnnnnnnnnnnnnnnnnnnnnnnnnnnnnnnnnnnnnnnnnnnnnnnnnnnnnnnnnnnnnnnnnnnnnnnnnnnnnnnnnnnnnnnnnnnnnnnnnnnnnnnnnnnnnnnnnnnnnnnnnnnnnnnnnnnnnnnnnnnnnnnnnnnnnnnnnnnnnnnnnnnnnnnnnnnnnnnnnnnnnnnnnnnnnnnnnnnnnnnnnnnnnnnnnnnnnnnnnnnnnnnnnnnnnnnnnnnnnnnnnnnnnnnnnnnnnnnnnnnnnnnnnnnnnnnnnnnnnnnnnnnnnnnnnnnnnnnnnnnnnnnnnnnnnnnnnnnnnnnnnnnnnnnnnnnnnnnnnnnnnnnnnnnnnnnnnnnnnnnnnnnnnnnnnnnnnnnnnnnnnnnnnnnnnnnnnnnnnnnnnnnnnnnnnnnnnnnnnnnnnnnnnnnnnnnnnnnnnnnnnnnnnnnnnnnnnnnnnnnnnnnnnnnnnnnnnnnnnnnnnnnnnnnnnnnnnnnnnnnnnnnnnnnnnnnnnnnnnnnnnnnnnnnnnnnnnnnnnnnnnnnnnnnnnnnnnnnnnnnnnnnnnnnnnnnnnnnnnnnnnnnnnnnnnnnnnnnnnnnnnnnnnnnnnnnnnnnnnnnnnnnnnnnnnnnnnnnnnnnnnnnnnnnnnnnnnnnnnnnnnnnnnnnnnnnnnnnnnnnnnnnnnnnnnnnnnnnnnnnnnnnnnnnnnnnnnnnnnnnnnnnnnnnnnnnnnnnnnnnnnnnnnnnnnnnnnnnnnnnnnnnnnnnnnnnnnnnnnnnnnnnnnnnnnnnnnnnnnnnnnnnnnnnnnnnnnnnnnnnnnnnnnnnnnnnnnnnnnnnnnnnnnnnnnnnnnnnnnnnnnnnnnnnnnnnnnnnnnnnnnnnnnnnnnnnnnnnnnnnnnnnnnnnnnnnnnnnnnnnnnnnnnnnnnnnnnnnnnnnnnnnnnnnnnnnnnnnnnnnnnnnnnnnnnnnnnnnnnnnnnnnnnnnnnnnnnnnnnnnnnnnnnnnnnnnnnnnnnnnnnnnnnnnnnnnnnnnnnnnnnnnnnnnnnnnnnnnnnnnnnnnnnnnnnnnnnnnnnnnnnnnnnnnnnnnnnnnnnnnnnnnnnnnnnnnnnnnnnnnnnnnnnnnnnnnnnnnnnnnnnnnnnnnnnnnnnnnnnnnnnnnnnnnnnnnnnnnnnnnnnnnnnnnnnnnnnnnnnnnnnnnnnnnnnnnnnnnnnnnnnnnnnnnnnnnnnnnnnnnnnnnnnnnnnnnnnnnnnnnnnnnnnnnnnnnnnnnnnnnnnnnnnnnnnnnnnnnnnnnnnnnnnnnnnnnnnnnnnnnnnnnnnnnnnnnnnnnnnnnnnnnnnnnnnnnnnnnnnnnnnnnnnnnnnnnnnnnnnnnnnnnnnnnnnnnnnnnnnnnnnnnnnnnnnnnnnnnnnnnnnnnnnnnnnnnnnnnnnnnnnnnnnnnnnnnnnnnnnnnnnnnnnnnnnnnnnnnnnnnnnnnnnnnnnnnnnnnnnnnnnnnnnnnnnnnnnnnnnnnnnnnnnnnnnnnnnnnnnnnnnnnnnnnnnnnnnnnnnnnnnnnnnnnnnnnnnnnnnnnnnnnnnnnnnnnnnnnnnnnnnnnnnnnnnnnnnnnnnnnnnnnnnnnnnnnnnnnnnnnnnnnnnnnnnnnnnnnnnnnnnnnnnnnnnnnnnnnnnnnnnnnnnnnnnnnnnnnnnnnnnnnnnnnnnnnnnnnnnnnnnnnnnnnnnnnnnnnnnnnnnnnnnnnnnnnnnnnnnnnnnnnnnnnnnnnnnnnnnnnnnnnnnnnnnnnnnnnnnnnnnnnnnnnnnnnnnnnnnnnnnnnnnnnnnnnnnnnnnnnnnnnnnnnnnnnnnnnnnnnnnnnnnnnnnnnnnnnnnnnnnnnnnnnnnnnnnnnnnnnnnnnnnnnnnnnnnnnnnnnnnnnnnnnnnnnnnnnnnnnnnnnnnnnnnnnnnnnnnnnnnnnnnnnnnnnnnnnnnnnnnnnnnnnnnnnnnnnnnnnnnnnnnnnnnnnnnnnnnnnnnnnnnnnnnnnnnnnnnnnnnnnnnnnnnnnnnnnnnnnnnnnnnnnnnnnnnnnnnnnnnnnnnnnnnnnnnnnnnnnnnnnnnnnnnnnnnnnnnnnnnnnnnnnnnnnnnnnnnnnnnnnnnnnnnnnnnnnnnnnnnnnnnnnnnnnnnnnnnnnnnnnnnnnnnnnnnnnnnnnnnnnnnnnnnnnnnnnnnnnnnnnnnnnnnnnnnnnnnnnnnnnnnnnnnnnnnnnnnnnnnnnnnnnnnnnnnnnnnnnnnnnnnnnnnnnnnnnnnnnnnnnnnnnnnnnnnnnnnnnnnnnnnnnnnnnnnnnnnnnnnnnnnnnnnnnnnnnnnnnnnnnnnnnnnnnnnnnnnnnnnnnnnnnnnnnnnnnnnnnnnnnnnnnnnnnnnnnnnnnnnnnnnnnnnnnnnnnnnnnnnnnnnnnnnnnnnnnnnnnnnnnnnnnnnnnnnnnnnnnnnnnnnnnnnnnnnnnnnnnnnnnnnnnnnnnnnnnnnnnnnnnnnnnnnnnnnnnnnnnnnnnnnnnnnnnnnnnnnnnnnnnnnnnnnnnnnnnnnnnnnnnnnnnnnnnnnnnnnnnnnnnnnnnnnnnnnnnnnnnnnnnnnnnnnnnnnnnnnnnnnnnnnnnnnnnnnnnnnnnnnnnnnnnnnnnnnnnnnnnnnnnnnnnnnnnnnnnnnnnnnnnnnnnnnnnnnnnnnnnnnnnnnnnnnnnnnnnnnnnnnnnnnnnnnnnnnnnnnnnnnnnnnnnnnnnnnnnnnnnnnnnnnnnnnnnnnnnnnnnnnnnnnnnnnnnnnnnnnnnnnnnnnnnnnnnnnnnnnnnnnnnnnnnnnnnnnnnnnnnnnnnnnnnnnnnnnnnnnnnnnnnnnnnnnnnnnnnnnnnnnnnnnnnnnnnnnnnnnnnnnnnnnnnnnnnnnnnnnnnnnnnnnnnnnnnnnnnnnnnnnnnnnnnnnnnnnnnnnnnnnnnnnnnnnnnnnnnnnnnnnnnnnnnnnnnnnnnnnnnnnnnnnnnnnnnnnnnnnnnnnnnnnnnnnnnnnnnnnnnnnnnnnnnnnnnnnnnnnnnnnnnnnnnnnnnnnnnnnnnnnnnnnnnnnnnnnnnnnnnnnnnnnnnnnnnnnnnnnnnnnnnnnnnnnnnnnnnnnnnnnnnnnnnnnnnnnnnnnnnnnnnnnnnnnnnnnnnnnnnnnnnnnnnnnnnnnnnnnnnnnnnnnnnnnnnnnnnnnnnnnnnnnnnnnnnnnnnnnnnnnnnnnnnnnnnnnnnnnnnnnnnnnnnnnnnnnnnnnnnnnnnnnnnnnnnnnnnnnnnnnnnnnnnnnnnnnnnnnnnnnnnnnnnnnnnnnnnnnnnnnnnnnnnnnnnnnnnnnnnnnnnnnnnnnnnnnnnnnnnnnnnnnnnnnnnnnnnnnnnnnnnnnnnnnnnnnnnnnnnnnnnnnnnnnnnnnnnnnnnnnnnnnnnnnnnnnnnnnnnnnnnnnnnnnnnnnnnnnnnnnnnnnnnnnnnnnnnnnnnnnnnnnnnnnnnnnnnnnnnnnnnnnnnnnnnnnnnnnnnnnnnnnnnnnnnnnnnnnnnnnnnnnnnnnnnnnnnnnnnnnnnnnnnnnnnnnnnnnnnnnnnnnnnnnnnnnnnnnnnnnnnnnnnnnnnnnnnnnnnnnnnnnnnnnnnnnnnnnnnnnnnnnnnnnnnnnnnnnnnnnnnnnnnnnnnnnnnnnnnnnnnnnnnnnnnnnnnnnnnnnnnnnnnnnnnnnnnnnnnnnnnnnnnnnnnnnnnnnnnnnnnnnnnnnnnnnnnnnnnnnnnnnnnnnnnnnnnnnnnnnnnnnnnnnnnnnnnnnnnnnnnnnnnnnnnnnnnnnnnnnnnnnnnnnnnnnnnnnnnnnnnnnnnnnnnnnnnnnnnnnnnnnnnnnnnnnnnnnnnnnnnnnnnnnnnnnnnnnnnnnnnnnnnnnnnnnnnnnnnnnnnnnnnnnnnnnnnnnnnnnnnnnnnnnnnnnnnnnnnnnnnnnnnnnnnnnnnnnnnnnnnnnnnnnnnnnnnnnnnnnnnnnnnnnnnnnnnnnnnnnnnnnnnnnnnnnnnnnnnnnnnnnnnnnnnnnnnnnnnnnnnnnnnnnnnnnnnnnnnnnnnnnnnnnnnnnnnnnnnnnnnnnnnnnnnnnnnnnnnnnnnnnnnnnnnnnnnnnnnnnnnnnnnnnnnnnnnnnnnnnnnnnnnnnnnnnnnnnnnnnnnnnnnnnnnnnnnnnnnnnnnnnnnnnnnnnnnnnnnnnnnnnnnnnnnnnnnnnnnnnnnnnnnnnnnnnnnnnnnnnnnnnnnnnnnnnnnnnnnnnnnnnnnnnnnnnnnnnnnnnnnnnnnnnnnnnnnnnnnnnnnnnnnnnnnnnnnnnnnnnnnnnnnnnnnnnnnnnnnnnnnnnnnnnnnnnnnnnnnnnnnnnnnnnnnnnnnnnnnnnnnnnnnnnnnnnnnnnnnnnnnnnnnnnnnnnnnnnnnnnnnnnnnnnnnnnnnnnnnnnnnnnnnnnnnnnnnnnnnnnnnnnnnnnnnnnnnnnnnnnnnnnnnnnnnnnnnnnnnnnnnnnnnnnnnnnnnnnnnnnnnnnnnnnnnnnnnnnnnnnnnnnnnnnnnnnnnnnnnnnnnnnnnnnnnnnnnnnnnnnnnnnnnnnnnnnnnnnnnnnnnnnnnnnnnnnnnnnnnnnnnnnnnnnnnnnnnnnnnnnnnnnnnnnnnnnnnnnnnnnnnnnnnnnnnnnnnnnnnnnnnnnnnnnnnnnnnnnnnnnnnnnnnnnnnnnnnnnnnnnnnnnnnnnnnnnnnnnnnnnnnnnnnnnnnnnnnnnnnnnnnnnnnnnnnnnnnnnnnnnnnnnnnnnnnnnnnnnnnnnnnnnnnnnnnnnnnnnnnnnnnnnnnnnnnnnnnnnnnnnnnnnnnnnnnnnnnnnnnnnnnnnnnnnnnnnnnnnnnnnnnnnnnnnnnnnnnnnnnnnnnnnnnnnnnnnnnnnnnnnnnnnnnnnnnnnnnnnnnnnnnnnnnnnnnnnnnnnnnnnnnnnnnnnnnnnnnnnnnnnnnnnnnnnnnnnnnnnnnnnnnnnnnnnnnnnnnnnnnnnnnnnnnnnnnnnnnnnnnnnnnnnnnnnnnnnnnnnnnnnnnnnnnnnnnnnnnnnnnnnnnnnnnnnnnnnnnnnnnnnnnnnnnnnnnnnnnnnnnnnnnnnnnnnnnnnnnnnnnnnnnnnnnnnnnnnnnnnnnnnnnnnnnnnnnnnnnnnnnnnnnnnnnnnnnnnnnnnnnnnnnnnnnnnnnnnnnnnnnnnnnnnnnnnnnnnnnnnnnnnnnnnnnnnnnnnnnnnnnnnnnnnnnnnnnnnnnnnnnnnnnnnnnnnnnnnnnnnnnnnnnnnnnnnnnnnnnnnnnnnnnnnnnnnnnnnnnnnnnnnnnnnnnnnnnnnnnnnnnnnnnnnnnnnnnnnnnnnnnnnnnnnnnnnnnnnnnnnnnnnnnnnnnnnnnnnnnnnnnnnnnnnnnnnnnnnnnnnnnnnnnnnnnnnnnnnnnnnnnnnnnnnnnnnnnnnnnnnnnnnnnnnnnnnnnnnnnnnnnnnnnnnnnnnnnnnnnnnnnnnnnnnnnnnnnnnnnnnnnnnnnnnnnnnnnnnnnnnnnnnnnnnnnnnnnnnnnnnnnnnnnnnnnnnnnnnnnnnnnnnnnnnnnnnnnnnnnnnnnnnnnnnnnnnnnnnnnnnnnnnnnnnnnnnnnnnnnnnnnnnnnnnnnnnnnnnnnnnnnnnnnnnnnnnnnnnnnnnnnnnnnnnnnnnnnnnnnnnnnnnnnnnnnnnnnnnnnnnnnnnnnnnnnnnnnnnnnnnnnnnnnnnnnnnnnnnnnnnnnnnnnnnnnnnnnnnnnnnnnnnnnnnnnnnnnnnnnnnnnnnnnnnnnnnnnnnnnnnnnnnnnnnnnnnnnnnnnnnnnnnnnnnnnnnnnnnnnnnnnnnnnnnnnnnnnnnnnnnnnnnnnnnnnnnnnnnnnnnnnnnnnnnnnnnnnnnnnnnnnnnnnnnnnnnnnnnnnnnnnnnnnnnnnnnnnnnnnnnnnnnnnnnnnnnnnnnnnnnnnnnnnnnnnnnnnnnnnnnnnnnnnnnnnnnnnnnnnnnnnnnnnnnnnnnnnnnnnnnnnnnnnnnnnnnnnnnnnnnnnnnnnnnnnnnnnnnnnnnnnnnnnnnnnnnnnnnnnnnnnnnnnnnnnnnnnnnnnnnnnnnnnnnnnnnnnnnnnnnnnnnnnnnnnnnnnnnnnnnnnnnnnnnnnnnnnnnnnnnnnnnnnnnnnnnnnnnnnnnnnnnnnnnnnnnnnnnnnnnnnnnnnnnnnnnnnnnnnnnnnnnnnnnnnnnnnnnnnnnnnnnnnnnnnnnnnnnnnnnnnnnnnnnnnnnnnnnnnnnnnnnnnnnnnnnnnnnnnnnnnnnnnnnnnnnnnnnnnnnnnnnnnnnnnnnnnnnnnnnnnnnnnnnnnnnnnnnnnnnnnnnnnnnnnnnnnnnnnnnnnnnnnnnnnnnnnnnnnnnnnnnnnnnnnnnnnnnnnnnnnnnnnnnnnnnnnnnnnnnnnnnnnnnnnnnnnnnnnnnnnnnnnnnnnnnnnnnnnnnnnnnnnnnnnnnnnnnnnnnnnnnnnnnnnnnnnnnnnnnnnnnnnnnnnnnnnnnnnnnnnnnnnnnnnnnnnnnnnnnnnnnnnnnnnnnnnnnnnnnnnnnnnnnnnnnnnnnnnnnnnnnnnnnnnnnnnnnnnnnnnnnnnnnnnnnnnnnnnnnnnnnnnnnnnnnnnnnnnnnnnnnnnnnnnnnnnnnnnnnnnnnnnnnnnnnnnnnnnnnnnnnnnnnnnnnnnnnnnnnnnnnnnnnnnnnnnnnnnnnnnnnnnnnnnnnnnnnnnnnnnnnnnnnnnnnnnnnnnnnnnnnnnnnnnnnnnnnnnnnnnnnnnnnnnnnnnnnnnnnnnnnnnnnnnnnnnnnnnnnnnnnnnnnnnnnnnnnnnnnnnnnnnnnnnnnnnnnnnnnnnnnnnnnnnnnnnnnnnnnnnnnnnnnnnnnnnnnnnnnnnnnnnnnnnnnnnnnnnnnnnnnnnnnnnnnnnnnnnnnnnnnnnnnnnnnnnnnnnnnnnnnnnnnnnnnnnnnnnnnnnnnnnnnnnnnnnnnnnnnnnnnnnnnnnnnnnnnnnnnnnnnnnnnnnnnnnnnnnnnnnnnnnnnnnnnnnnnnnnnnnnnnnnnnnnnnnnnnnnnnnnnnnnnnnnnnnnnnnnnnnnnnnnnnnnnnnnnnnnnnnnnnnnnnnnnnnnnnnnnnnnnnnnnnnnnnnnnnnnnnnnnnnnnnnnnnnnnnnnnnnnnnnnnnnnnnnnnnnnnnnnnnnnnnnnnnnnnnnnnnnnnnnnnnnnnnnnnnnnnnnnnnnnnnnnnnnnnnnnnnnnnnnnnnnnnnnnnnnnnnnnnnnnnnnnnnnnnnnnnnnnnnnnnnnnnnnnnnnnnnnnnnnnnnnnnnnnnnnnnnnnnnnnnnnnnnnnnnnnnnnnnnnnnnnnnnnnnnnnnnnnnnnnnnnnnnnnnnnnnnnnnnnnnnnnnnnnnnnnnnnnnnnnnnnnnnnnnnnnnnnnnnnnnnnnnnnnnnnnnnnnnnnnnnnnnnnnnnnnnnnnnnnnnnnnnnnnnnnnnnnnnnnnnnnnnnnnnnnnnnnnnnnnnnnnnnnnnnnnnnnnnnnnnnnnnnnnnnnnnnnnnnnnnnnnnnnnnnnnnnnnnnnnnnnnnnnnnnnnnnnnnnnnnnnnnnnnnnnnnnnnnnnnnnnnnnnnnnnnnnnnnnnnnnnnnnnnnnnnnnnnnnnnnnnnnnnnnnnnnnnnnnnnnnnnnnnnnnnnnnnnnnnnnnnnnnnnnnnnnnnnnnnnnnnnnnnnnnnnnnnnnnnnnnnnnnnnnnnnnnnnnnnnnnnnnnnnnnnnnnnnnnnnnnnnnnnnnnnnnnnnnnnnnnnnnnnnnnnnnnnnnnnnnnnnnnnnnnnnnnnnnnnnnnnnnnnnnnnnnnnnnnnnnnnnnnnnnnnnnnnnnnnnnnnnnnnnnnnnnnnnnnnnnnnnnnnnnnnnnnnnnnnnnnnnnnnnnnnnnnnnnnnnnnnnnnnnnnnnnnnnnnnnnnnnnnnnnnnnnnnnnnnnnnnnnnnnnnnnnnnnnnnnnnnnnnnnnnnnnnnnnnnnnnnnnnnnnnnnnnnnnnnnnnnnnnnnnnnnnnnnnnnnnnnnnnnnnnnnnnnnnnnnnnnnnnnnnnnnnnnnnnnnnnnnnnnnnnnnnnnnnnnnnnnnnnnnnnnnnnnnnnnnnnnnnnnnnnnnnnnnnnnnnnnnnnnnnnnnnnnnnnnnnnnnnnnnnnnnnnnnnnnnnnnnnnnnnnnnnnnnnnnnnnnnnnnnnnnnnnnnnnnnnnnnnnnnnnnnnnnnnnnnnnnnnnnnnnnnnnnnnnnnnnnnnnnnnnnnnnnnnnnnnnnnnnnnnnnnnnnnnnnnnnnnnnnnnnnnnnnnnnnnnnnnnnnnnnnnnnnnnnnnnnnnnnnnnnnnnnnnnnnnnnnnnnnnnnnnnnnnnnnnnnnnnnnnnnnnnnnnnnnnnnnnnnnnnnnnnnnnnnnnnnnnnnnnnnnnnnnnnnnnnnnnnnnnnnnnnnnnnnnnnnnnnnnnnnnnnnnnnnnnnnnnnnnnnnnnnnnnnnnnnnnnnnnnnnnnnnnnnnnnnnnnnnnnnnnnnnnnnnnnnnnnnnnnnnnnnnnnnnnnnnnnnnnnnnnnnnnnnnnnnnnnnnnnnnnnnnnnnnnnnnnnnnnnnnnnnnnnnnnnnnnnnnnnnnnnnnnnnnnnnnnnnnnnnnnnnnnnnnnnnnnnnnnnnnnnnnnnnnnnnnnnnnnnnnnnnnnnnnnnnnnnnnnnnnnnnnnnnnnnnnnnnnnnnnnnnnnnnnnnnnnnnnnnnnnnnnnnnnnnnnnnnnnnnnnnnnnnnnnnnnnnnnnnnnnnnnnnnnnnnnnnnnnnnnnnnnnnnnnnnnnnnnnnnnnnnnnnnnnnnnnnnnnnnnnnnnnnnnnnnnnnnnnnnnnnnnnnnnnnnnnnnnnnnnnnnnnnnnnnnnnnnnnnnnnnnnnnnnnnnnnnnnnnnnnnnnnnnnnnnnnnnnnnnnnnnnnnnnnnnnnnnnnnnnnnnnnnnnnnnnnnnnnnnnnnnnnnnnnnnnnnnnnnnnnnnnnnnnnnnnnnnnnnnnnnnnnnnnnnnnnnnnnnnnnnnnnnnnnnnnnnnnnnnnnnnnnnnnnnnnnnnnnnnnnnnnnnnnnnnnnnnnnnnnnnnnnnnnnnnnnnnnnnnnnnnnnnnnnnnnnnnnnnnnnnnnnnnnnnnnnnnnnnnnnnnnnnnnnnnnnnnnnnnnnnnnnnnnnnnnnnnnnnnnnnnnnnnnnnnnnnnnnnnnnnnnnnnnnnnnnnnnnnnnnnnnnnnnnnnnnnnnnnnnnnnnnnnnnnnnnnnnnnnnnnnnnnnnnnnnnnnnnnnnnnnnnnnnnnnnnnnnnnnnnnnnnnnnnnnnnnnnnnnnnnnnnnnnnnnnnnnnnnnnnnnnnnnnnnnnnnnnnnnnnnnnnnnnnnnnnnnnnnnnnnnnnnnnnnnnnnnnnnnnnnnnnnnnnnnnnnnnnnnnnnnnnnnnnnnnnnnnnnnnnnnnnnnnnnnnnnnnnnnnnnnnnnnnnnnnnnnnnnnnnnnnnnnnnnnnnnnnnnnnnnnnnnnnnnnnnnnnnnnnnnnnnnnnnnnnnnnnnnnnnnnnnnnnnnnnnnnnnnnnnnnnnnnnnnnnnnnnnnnnnnnnnnnnnnnnnnnnnnnnnnnnnnnnnnnnnnnnnnnnnnnnnnnnnnnnnnnnnnnnnnnnnnnnnnnnnnnnnnnnnnnnnnnnnnnnnnnnnnnnnnnnnnnnnnnnnnnnnnnnnnnnnnnnnnnnnnnnnnnnnnnnnnnnnnnnnnnnnnnnnnnnnnnnnnnnnnnnnnnnnnnnnnnnnnnnnnnnnnnnnnnnnnnnnnnnnnnnnnnnnnnnnnnnnnnnnnnnnnnnnnnnnnnnnnnnnnnnnnnnnnnnnnnnnnnnnnnnnnnnnnnnnnnnnnnnnnnnnnnnnnnnnnnnnnnnnnnnnnnnnnnnnnnnnnnnnnnnnnnnnnnnnnnnnnnnnnnnnnnnnnnnnnnnnnnnnnnnnnnnnnnnnnnnnnnnnnnnnnnnnnnnnnnnnnnnnnnnnnnnnnnnnnnnnnnnnnnnnnnnnnnnnnnnnnnnnnnnnnnnnnnnnnnnnnnnnnnnnnnnnnnnnnnnnnnnnnnnnnnnnnnnnnnnnnnnnnnnnnnnnnnnnnnnnnnnnnnnnnnnnnnnnnnnnnnnnnnnnnnnnnnnnnnnnnnnnnnnnnnnnnnnnnnnnnnnnnnnnnnnnnnnnnnnnnnnnnnnnnnnnnnnnnnnnnnnnnnnnnnnnnnnnnnnnnnnnnnnnnnnnnnnnnnnnnnnnnnnnnnnnnnnnnnnnnnnnnnnnnnnnnnnnnnnnnnnnnnnnnnnnnnnnnnnnnnnnnnnnnnnnnnnnnnnnnnnnnnnnnnnnnnnnnnnnnnnnnnnnnnnnnnnnnnnnnnnnnnnnnnnnnnnnnnnnnnnnnnnnnnnnnnnnnnnnnnnnnnnnnnnnnnnnnnnnnnnnnnnnnnnnnnnnnnnnnnnnnnnnnnnnnnnnnnnnnnnnnnnnnnnnnnnnnnnnnnnnnnnnnnnnnnnnnnnnnnnnnnnnnnnnnnnnnnnnnnnnnnnnnnnnnnnnnnnnnnnnnnnnnnnnnnnnnnnnnnnnnnnnnnnnnnnnnnnnnnnnnnnnnnnnnnnnnnnnnnnnnnnnnnnnnnnnnnnnnnnnnnnnnnnnnnnnnnnnnnnnnnnnnnnnnnnnnnnnnnnnnnnnnnnnnnnnnnnnnnnnnnnnnnnnnnnnnnnnnnnnnnnnnnnnnnnnnnnnnnnnnnnnnnnnnnnnnnnnnnnnnnnnnnnnnnnnnnnnnnnnnnnnnnnnnnnnnnnnnnnnnnnnnnnnnnnnnnnnnnnnnnnnnnnnnnnnnnnnnnnnnnnnnnnnnnnnnnnnnnnnnnnnnnnnnnnnnnnnnnnnnnnnnnnnnnnnnnnnnnnnnnnnnnnnnnnnnnnnnnnnnnnnnnnnnnnnnnnnnnnnnnnnnnnnnnnnnnnnnnnnnnnnnnnnnnnnnnnnnnnnnnnnnnnnnnnnnnnnnnnnnnnnnnnnnnnnnnnnnnnnnnnnnnnnnnnnnnnnnnnnnnnnnnnnnnnnnnnnnnnnnnnnnnnnnnnnnnnnnnnnnnnnnnnnnnnnnnnnnnnnnnnnnnnnnnnnnnnnnnnnnnnnnnnnnnnnnnnnnnnnnnnnnnnnnnnnnnnnnnnnnnnnnnnnnnnnnnnnnnnnnnnnnnnnnnnnnnnnnnnnnnnnnnnnnnnnnnnnnnnnnnnnnnnnnnnnnnnnnnnnnnnnnnnnnnnnnnnnnnnnnnnnnnnnnnnnnnnnnnnnnnnnnnnnnnnnnnnnnnnnnnnnnnnnnnnnnnnnnnnnnnnnnnnnnnnnnnnnnnnnnnnnnnnnnnnnnnnnnnnnnnnnnnnnnnnnnnnnnnnnnnnnnnnnnnnnnnnnnnnnnnnnnnnnnnnnnnnnnnnnnnnnnnnnnnnnnnnnnnnnnnnnnnnnnnnnnnnnnnnnnnnnnnnnnnnnnnnnnnnnnnnnnnnnnnnnnnnnnnnnnnnnnnnnnnnnnnnnnnnnnnnnnnnnnnnnnnnnnnnnnnnnnnnnnnnnnnnnnnnnnnnnnnnnnnnnnnnnnnnnnnnnnnnnnnnnnnnnnnnnnnnnnnnnnnnnnnnnnnnnnnnnnnnnnnnnnnnnnnnnnnnnnnnnnnnnnnnnnnnnnnnnnnnnnnnnnnnnnnnnnnnnnnnnnnnnnnnnnnnnnnnnnnnnnnnnnnnnnnnnnnnnnnnnnnnnnnnnnnnnnnnnnnnnnnnnnnnnnnnnnnnnnnnnnnnnnnnnnnnnnnnnnnnnnnnnnnnnnnnnnnnnnnnnnnnnnnnnnnnnnnnnnnnnnnnnnnnnnnnnnnnnnnnnnnnnnnnnnnnnnnnnnnnnnnnnnnnnnnnnnnnnnnnnnnnnnnnnnnnnnnnnnnnnnnnnnnnnnnnnnnnnnnnnnnnnnnnnnnnnnnnnnnnnnnnnnnnnnnnnnnnnnnnnnnnnnnnnnnnnnnnnnnnnnnnnnnnnnnnnnnnnnnnnnnnnnnnnnnnnnnnnnnnnnnnnnnnnnnnnnnnnnnnnnnnnnnnnnnnnnnnnnnnnnnnnnnnnnnnnnnnnnnnnnnnnnnnnnnnnnnnnnnnnnnnnnnnnnnnnnnnnnnnnnnnnnnnnnnnnnnnnnnnnnnnnnnnnnnnnnnnnnnnnnnnnnnnnnnnnnnnnnnnnnnnnnnnnnnnnnnnnnnnnnnnnnnnnnnnnnnnnnnnnnnnnnnnnnnnnnnnnnnnnnnnnnnnnnnnnnnnnnnnnnnnnnnnnnnnnnnnnnnnnnnnnnnnnnnnnnnnnnnnnnnnnnnnnnnnnnnnnnnnnnnnnnnnnnnnnnnnnnnnnnnnnnnnnnnnnnnnnnnnnnnnnnnnnnnnnnnnnnnnnnnnnnnnnnnnnnnnnnnnnnnnnnnnnnnnnnnnnnnnnnnnnnnnnnnnnnnnnnnnnnnnnnnnnnnnnnnnnnnnnnnnnnnnnnnnnnnnnnnnnnnnnnnnnnnnnnnnnnnnnnnnnnnnnnnnnnnnnnnnnnnnnnnnnnnnnnnnnnnnnnnnnnnnnnnnnnnnnnnnnnnnnnnnnnnnnnnnnnnnnnnnnnnnnnnnnnnnnnnnnnnnnnnnnnnnnnnnnnnnnnnnnnnnnnnnnnnnnnnnnnnnnnnnnnnnnnnnnnnnnnnnnnnnnnnnnnnnnnnnnnnnnnnnnnnnnnnnnnnnnnnnnnnnnnnnnnnnnnnnnnnnnnnnnnnnnnnnnnnnnnnnnnnnnnnnnnnnnnnnnnnnnnnnnnnnnnnnnnnnnnnnnnnnnnnnnnnnnnnnnnnnnnnnnnnnnnnnnnnnnnnnnnnnnnnnnnnnnnnnnnnnnnnnnnnnnnnnnnnnnnnnnnnnnnnnnnnnnnnnnnnnnnnnnnnnnnnnnnnnnnnnnnnnnnnnnnnnnnnnnnnnnnnnnnnnnnnnnnnnnnnnnnnnnnnnnnnnnnnnnnnnnnnnnnnnnnnnnnnnnnnnnnnnnnnnnnnnnnnnnnnnnnnnnnnnnnnnnnnnnnnnnnnnnnnnnnnnnnnnnnnnnnnnnnnnnnnnnnnnnnnnnnnnnnnnnnnnnnnnnnnnnnnnnnnnnnnnnnnnnnnnnnnnnnnnnnnnnnnnnnnnnnnnnnnnnnnnnnnnnnnnnnnnnnnnnnnnnnnnnnnnnnnnnnnnnnnnnnnnnnnnnnnnnnnnnnnnnnnnnnnnnnnnnnnnnnnnnnnnnnnnnnnnnnnnnnnnnnnnnnnnnnnnnnnnnnnnnnnnnnnnnnnnnnnnnnnnnnnnnnnnnnnnnnnnnnnnnnnnnnnnnnnnnnnnnnnnnnnnnnnnnnnnnnnnnnnnnnnnnnnnnnnnnnnnnnnnnnnnnnnnnnnnnnnnnnnnnnnnnnnnnnnnnnnnnnnnnnnnnnnnnnnnnnnnnnnnnnnnnnnnnnnnnnnnnnnnnnnnnnnnnnnnnnnnnnnnnnnnnnnnnnnnnnnnnnnnnnnnnnnnnnnnnnnnnnnnnnnnnnnnnnnnnnnnnnnnnnnnnnnnnnnnnnnnnnnnnnnnnnnnnnnnnnnnnnnnnnnnnnnnnnnnnnnnnnnnnnnnnnnnnnnnnnnnnnnnnnnnnnnnnnnnnnnnnnnnnnnnnnnnnnnnnnnnnnnnnnnnnnnnnnnnnnnnnnnnnnnnnnnnnnnnnnnnnnnnnnnnnnnnnnnnnnnnnnnnnnnnnnnnnnnnnnnnnnnnnnnnnnnnnnnnnnnnnnnnnnnnnnnnnnnnnnnnnnnnnnnnnnnnnnnnnnnnnnnnnnnnnnnnnnnnnnnnnnnnnnnnnnnnnnnnnnnnnnnnnnnnnnnnnnnnnnnnnnnnnnnnnnnnnnnnnnnnnnnnnnnnnnnnnnnnnnnnnnnnnnnnnnnnnnnnnnnnnnnnnnnnnnnnnnnnnnnnnnnnnnnnnnnnnnnnnnnnnnnnnnnnnnnnnnnnnnnnnnnnnnnnnnnnnnnnnnnnnnnnnnnnnnnnnnnnnnnnnnnnnnnnnnnnnnnnnnnnnnnnnnnnnnnnnnnnnnnnnnnnnnnnnnnnnnnnnnnnnnnnnnnnnnnnnnnnnnnnnnnnnnnnnnnnnnnnnnnnnnnnnnnnnnnnnnnnnnnnnnnnnnnnnnnnnnnnnnnnnnnnnnnnnnnnnnnnnnnnnnnnnnnnnnnnnnnnnnnnnnnnnnnnnnnnnnnnnnnnnnnnnnnnnnnnnnnnnnnnnnnnnnnnnnnnnnnnnnnnnnnnnnnnnnnnnnnnnnnnnnnnnnnnnnnnnnnnnnnnnnnnnnnnnnnnnnnnnnnnnnnnnnnnnnnnnnnnnnnnnnnnnnnnnnnnnnnnnnnnnnnnnnnnnnnnnnnnnnnnnnnnnnnnnnnnnnnnnnnnnnnnnnnnnnnnnnnnnnnnnnnnnnnnnnnnnnnnnnnnnnnnnnnnnnnnnnnnnnnnnnnnnnnnnnnnnnnnnnnnnnnnnnnnnnnnnnnnnnnnnnnnnnnnnnnnnnnnnnnnnnnnnnnnnnnnnnnnnnnnnnnnnnnnnnnnnnnnnnnnnnnnnnnnnnnnnnnnnnnnnnnnnnnnnnnnnnnnnnnnnnnnnnnnnnnnnnnnnnnnnnnnnnnnnnnnnnnnnnnnnnnnnnnnnnnnnnnnnnnnnnnnnnnnnnnnnnnnnnnnnnnnnnnnnnnnnnnnnnnnnnnnnnnnnnnnnnnnnnnnnnnnnnnnnnnnnnnnnnnnnnnnnnnnnnnnnnnnnnnnnnnnnnnnnnnnnnnnnnnnnnnnnnnnnnnnnnnnnnnnnnnnnnnnnnnnnnnnnnnnnnnnnnnnnnnnnnnnnnnnnnnnnnnnnnnnnnnnnnnnnnnnnnnnnnnnnnnnnnnnnnnnnnnnnnnnnnnnnnnnnnnnnnnnnnnnnnnnnnnnnnnnnnnnnnnnnnnnnnnnnnnnnnnnnnnnnnnnnnnnnnnnnnnnnnnnnnnnnnnnnnnnnnnnnnnnnnnnnnnnnnnnnnnnnnnnnnnnnnnnnnnnnnnnnnnnnnnnnnnnnnnnnnnnnnnnnnnnnnnnnnnnnnnnnnnnnnnnnnnnnnnnnnnnnnnnnnnnnnnnnnnnnnnnnnnnnnnnnnnnnnnnnnnnnnnnnnnnnnnnnnnnnnnnnnnnnnnnnnnnnnnnnnnnnnnnnnnnnnnnnnnnnnnnnnnnnnnnnnnnnnnnnnnnnnnnnnnnnnnnnnnnnnnnnnnnnnnnnnnnnnnnnnnnnnnnnnnnnnnnnnnnnnnnnnnnnnnnnnnnnnnnnnnnnnnnnnnnnnnnnnnnnnnnnnnnnnnnnnnnnnnnnnnnnnnnnnnnnnnnnnnnnnnnnnnnnnnnnnnnnnnnnnnnnnnnnnnnnnnnnnnnnnnnnnnnnnnnnnnnnnnnnnnnnnnnnnnnnnnnnnnnnnnnnnnnnnnnnnnnnnnnnnnnnnnnnnnnnnnnnnnnnnnnnnnnnnnnnnnnnnnnnnnnnnnnnnnnnnnnnnnnnnnnnnnnnnnnnnnnnnnnnnnnnnnnnnnnnnnnnnnnnnnnnnnnnnnnnnnnnnnnnnnnnnnnnnnnnnnnnnnnnnnnnnnnnnnnnnnnnnnnnnnnnnnnnnnnnnnnnnnnnnnnnnnnnnnnnnnnnnnnnnnnnnnnnnnnnnnnnnnnnnnnnnnnnnnnnnnnnnnnnnnnnnnnnnnnnnnnnnnnnnnnnnnnnnnnnnnnnnnnnnnnnnnnnnnnnnnnnnnnnnnnnnnnnnnnnnnnnnnnnnnnnnnnnnnnnnnnnnnnnnnnnnnnnnnnnnnnnnnnnnnnnnnnnnnnnnnnnnnnnnnnnnnnnnnnnnnnnnnnnnnnnnnnnnnnnnnnnnnnnnnnnnnnnnnnnnnnnnnnnnnnnnnnnnnnnnnnnnnnnnnnnnnnnnnnnnnnnnnnnnnnnnnnnnnnnnnnnnnnnnnnnnnnnnnnnnnnnnnnnnnnnnnnnnnnnnnnnnnnnnnnnnnnnnnnnnnnnnnnnnnnnnnnnnnnnnnnnnnnnnnnnnnnnnnnnnnnnnnnnnnnnnnnnnnnnnnnnnnnnnnnnnnnnnnnnnnnnnnnnnnnnnnnnnnnnnnnnnnnnnnnnnnnnnnnnnnnnnnnnnnnnnnnnnnnnnnnnnnnnnnnnnnnnnnnnnnnnnnnnnnnnnnnnnnnnnnnnnnnnnnnnnnnnnnnnnnnnnnnnnnnnnnnnnnnnnnnnnnnnnnnnnnnnnnnnnnnnnnnnnnnnnnnnnnnnnnnnnnnnnnnnnnnnnnnnnnnnnnnnnnnnnnnnnnnnnnnnnnnnnnnnnnnnnnnnnnnnnnnnnnnnnnnnnnnnnnnnnnnnnnnnnnnnnnnnnnnnnnnnnnnnnnnnnnnnnnnnnnnnnnnnnnnnnnnnnnnnnnnnnnnnnnnnnnnnnnnnnnnnnnnnnnnnnnnnnnnnnnnnnnnnnnnnnnnnnnnnnnnnnnnnnnnnnnnnnnnnnnnnnnnnnnnnnnnnnnnnnnnnnnnnnnnnnnnnnnnnnnnnnnnnnnnnnnnnnnnnnnnnnnnnnnnnnnnnnnnnnnnnnnnnnnnnnnnnnnnnnnnnnnnnnnnnnnnnnnnnnnnnnnnnnnnnnnnnnnnnnnnnnnnnnnnnnnnnnnnnnnnnnnnnnnnnnnnnnnnnnnnnnnnnnnnnnnnnnnnnnnnnnnnnnnnnnnnnnnnnnnnnnnnnnnnnnnnnnnnnnnnnnnnnnnnnnnnnnnnnnnnnnnnnnnnnnnnnnnnnnnnnnnnnnnnnnnnnnnnnnnnnnnnnnnnnnnnnnnnnnnnnnnnnnnnnnnnnnnnnnnnnnnnnnnnnnnnnnnnnnnnnnnnnnnnnnnnnnnnnnnnnnnnnnnnnnnnnnnnnnnnnnnnnnnnnnnnnnnnnnnnnnnnnnnnnnnnnnnnnnnnnnnnnnnnnnnnnnnnnnnnnnnnnnnnnnnnnnnnnnnnnnnnnnnnnnnnnnnnnnnnnnnnnnnnnnnnnnnnnnnnnnnnnnnnnnnnnnnnnnnnnnnnnnnnnnnnnnnnnnnnnnnnnnnnnnnnnnnnnnnnnnnnnnnnnnnnnnnnnnnnnnnnnnnnnnnnnnnnnnnnnnnnnnnnnnnnnnnnnnnnnnnnnnnnnnnnnnnnnnnnnnnnnnnnnnnnnnnnnnnnnnnnnnnnnnnnnnnnnnnnnnnnnnnnnnnnnnnnnnnnnnnnnnnnnnnnnnnnnnnnnnnnnnnnnnnnnnnnnnnnnnnnnnnnnnnnnnnnnnnnnnnnnnnnnnnnnnnnnnnnnnnnnnnnnnnnnnnnnnnnnnnnnnnnnnnnnnnnnnnnnnnnnnnnnnnnnnnnnnnnnnnnnnnnnnnnnnnnnnnnnnnnnnnnnnnnnnnnnnnnnnnnnnnnnnnnnnnnnnnnnnnnnnnnnnnnnnnnnnnnnnnnnnnnnnnnnnnnnnnnnnnnnnnnnnnnnnnnnnnnnnnnnnnnnnnnnnnnnnnnnnnnnnnnnnnnnnnnnnnnnnnnnnnnnnnnnnnnnnnnnnnnnnnnnnnnnnnnnnnnnnnnnnnnnnnnnnnnnnnnnnnnnnnnnnnnnnnnnnnnnnnnnnnnnnnnnnnnnnnnnnnnnnnnnnnnnnnnnnnnnnnnnnnnnnnnnnnnnnnnnnnnnnnnnnnnnnnnnnnnnnnnnnnnnnnnnnnnnnnnnnnnnnnnnnnnnnnnnnnnnnnnnnnnnnnnnnnnnnnnnnnnnnnnnnnnnnnnnnnnnnnnnnnnnnnnnnnnnnnnnnnnnnnnnnnnnnnnnnnnnnnnnnnnnnnnnnnnnnnnnnnnnnnnnnnnnnnnnnnnnnnnnnnnnnnnnnnnnnnnnnnnnnnnnnnnnnnnnnnnnnnnnnnnnnnnnnnnnnnnnnnnnnnnnnnnnnnnnnnnnnnnnnnnnnnnnnnnnnnnnnnnnnnnnnnnnnnnnnnnnnnnnnnnnnnnnnnnnnnnnnnnnnnnnnnnnnnnnnnnnnnnnnnnnnnnnnnnnnnnnnnnnnnnnnnnnnnnnnnnnnnnnnnnnnnnnnnnnnnnnnnnnnnnnnnnnnnnnnnnnnnnnnnnnnnnnnnnnnnnnnnnnnnnnnnnnnnnnnnnnnnnnnnnnnnnnnnnnnnnnnnnnnnnnnnnnnnnnnnnnnnnnnnnnnnnnnnnnnnnnnnnnnnnnnnnnnnnnnnnnnnnnnnnnnnnnnnnnnnnnnnnnnnnnnnnnnnnnnnnnnnnnnnnnnnnnnnnnnnnnnnnnnnnnnnnnnnnnnnnnnnnnnnnnnnnnnnnnnnnnnnnnnnnnnnnnnnnnnnnnnnnnnnnnnnnnnnnnnnnnnnnnnnnnnnnnnnnnnnnnnnnnnnnnnnnnnnnnnnnnnnnnnnnnnnnnnnnnnnnnnnnnnnnnnnnnnnnnnnnnnnnnnnnnnnnnnnnnnnnnnnnnnnnnnnnnnnnnnnnnnnnnnnnnnnnnnnnnnnnnnnnnnnnnnnnnnnnnnnnnnnnnnnnnnnnnnnnnnnnnnnnnnnnnnnnnnnnnnnnnnnnnnnnnnnnnnnnnnnnnnnnnnnnnnnnnnnnnnnnnnnnnnnnnnnnnnnnnnnnnnnnnnnnnnnnnnnnnnnnnnnnnnnnnnnnnnnnnnnnnnnnnnnnnnnnnnnnnnnnnnnnnnnnnnnnnnnnnnnnnnnnnnnnnnnnnnnnnnnnnnnnnnnnnnnnnnnnnnnnnnnnnnnnnnnnnnnnnnnnnnnnnnnnnnnnnnnnnnnnnnnnnnnnnnnnnnnnnnnnnnnnnnnnnnnnnnnnnnnnnnnnnnnnnnnnnnnnnnnnnnnnnnnnnnnnnnnnnnnnnnnnnnnnnnnnnnnnnnnnnnnnnnnnnnnnnnnnnnnnnnnnnnnnnnnnnnnnnnnnnnnnnnnnnnnnnnnnnnnnnnnnnnnnnnnnnnnnnnnnnnnnnnnnnnnnnnnnnnnnnnnnnnnnnnnnnnnnnnnnnnnnnnnnnnnnnnnnnnnnnnnnnnnnnnnnnnnnnnnnnnnnnnnnnnnnnnnnnnnnnnnnnnnnnnnnnnnnnnnnnnnnnnnnnnnnnnnnnnnnnnnnnnnnnnnnnnnnnnnnnnnnnnnnnnnnnnnnnnnnnnnnnnnnnnnnnnnnnnnnnnnnnnnnnnnnnnnnnnnnnnnnnnnnnnnnnnnnnnnnnnnnnnnnnnnnnnnnnnnnnnnnnnnnnnnnnnnnnnnnnnnnnnnnnnnnnnnnnnnnnnnnnnnnnnnnnnnnnnnnnnnnnnnnnnnnnnnnnnnnnnnnnnnnnnnnnnnnnnnnnnnnnnnnnnnnnnnnnnnnnnnnnnnnnnnnnnnnnnnnnnnnnnnnnnnnnnnnnnnnnnnnnnnnnnnnnnnnnnnnnnnnnnnnnnnnnnnnnnnnnnnnnnnnnnnnnnnnnnnnnnnnnnnnnnnnnnnnnnnnnnnnnnnnnnnnnnnnnnnnnnnnnnnnnnnnnnnnnnnnnnnnnnnnnnnnnnnnnnnnnnnnnnnnnnnnnnnnnnnnnnnnnnnnnnnnnnnnnnnnnnnnnnnnnnnnnnnnnnnnnnnnnnnnnnnnnnnnnnnnnnnnnnnnnnnnnnnnnnnnnnnnnnnnnnnnnnnnnnnnnnnnnnnnnnnnnnnnnnnnnnnnnnnnnnnnnnnnnnnnnnnnnnnnnnnnnnnnnnnnnnnnnnnnnnnnnnnnnnnnnnnnnnnnnnnnnnnnnnnnnnnnnnnnnnnnnnnnnnnnnnnnnnnnnnnnnnnnnnnnnnnnnnnnnnnnnnnnnnnnnnnnnnnnnnnnnnnnnnnnnnnnnnnnnnnnnnnnnnnnnnnnnnnnnnnnnnnnnnnnnnnnnnnnnnnnnnnnnnnnnnnnnnnnnnnnnnnnnnnnnnnnnnnnnnnnnnnnnnnnnnnnnnnnnnnnnnnnnnnnnnnnnnnnnnnnnnnnnnnnnnnnnnnnnnnnnnnnnnnnnnnnnnnnnnnnnnnnnnnnnnnnnnnnnnnnnnnnnnnnnnnnnnnnnnnnnnnnnnnnnnnnnnnnnnnnnnnnnnnnnnnnnnnnnnnnnnnnnnnnnnnnnnnnnnnnnnnnnnnnnnnnnnnnnnnnnnnnnnnnnnnnnnnnnnnnnnnnnnnnnnnnnnnnnnnnnnnnnnnnnnnnnnnnnnnnnnnnnnnnnnnnnnnnnnnnnnnnnnnnnnnnnnnnnnnnnnnnnnnnnnnnnnnnnnnnnnnnnnnnnnnnnnnnnnnnnnnnnnnnnnnnnnnnnnnnnnnnnnnnnnnnnnnnnnnnnnnnnnnnnnnnnnnnnnnnnnnnnnnnnnnnnnnnnnnnnnnnnnnnnnnnnnnnnnnnnnnnnnnnnnnnnnnnnnnnnnnnnnnnnnnnnnnnnnnnnnnnnnnnnnnnnnnnnnnnnnnnnnnnnnnnnnnnnnnnnnnnnnnnnnnnnnnnnnnnnnnnnnnnnnnnnnnnnnnnnnnnnnnnnnnnnnnnnnnnnnnnnnnnnnnnnnnnnnnnnnnnnnnnnnnnnnnnnnnnnnnnnnnnnnnnnnnnnnnnnnnnnnnnnnnnnnnnnnnnnnnnnnnnnnnnnnnnnnnnnnnnnnnnnnnnnnnnnnnnnnnnnnnnnnnnnnnnnnnnnnnnnnnnnnnnnnnnnnnnnnnnnnnnnnnnnnnnnnnnnnnnnnnnnnnnnnnnnnnnnnnnnnnnnnnnnnnnnnnnnnnnnnnnnnnnnnnnnnnnnnnnnnnnnnnnnnnnnnnnnnnnnnnnnnnnnnnnnnnnnnnnnnnnnnnnnnnnnnnnnnnnnnnnnnnnnnnnnnnnnnnnnnnnnnnnnnnnnnnnnnnnnnnnnnnnnnnnnnnnnnnnnnnnnnnnnnnnnnnnnnnnnnnnnnnnnnnnnnnnnnnnnnnnnnnnnnnnnnnnnnnnnnnnnnnnnnnnnnnnnnnnnnnnnnnnnnnnnnnnnnnnnnnnnnnnnnnnnnnnnnnnnnnnnnnnnnnnnnnnnnnnnnnnnnnnnnnnnnnnnnnnnnnnnnnnnnnnnnnnnnnnnnnnnnnnnnnnnnnnnnnnnnnnnnnnnnnnnnnnnnnnnnnnnnnnnnnnnnnnnnnnnnnnnnnnnnnnnnnnnnnnnnnnnnnnnnnnnnnnnnnnnnnnnnnnnnnnnnnnnnnnnnnnnnnnnnnnnnnnnnnnnnnnnnnnnnnnnnnnnnnnnnnnnnnnnnnnnnnnnnnnnnnnnnnnnnnnnnnnnnnnnnnnnnnnnnnnnnnnnnnnnnnnnnnnnnnnnnnnnnnnnnnnnnnnnnnnnnnnnnnnnnnnnnnnnnnnnnnnnnnnnnnnnnnnnnnnnnnnnnnnnnnnnnnnnnnnnnnnnnnnnnnnnnnnnnnnnnnnnnnnnnnnnnnnnnnnnnnnnnnnnnnnnnnnnnnnnnnnnnnnnnnnnnnnnnnnnnnnnnnnnnnnnnnnnnnnnnnnnnnnnnnnnnnnnnnnnnnnnnnnnnnnnnnnnnnnnnnnnnnnnnnnnnnnnnnnnnnnnnnnnnnnnnnnnnnnnnnnnnnnnnnnnnnnnnnnnnnnnnnnnnnnnnnnnnnnnnnnnnnnnnnnnnnnnnnnnnnnnnnnnnnnnnnnnnnnnnnnnnnnnnnnnnnnnnnnnnnnnnnnnnnnnnnnnnnnnnnnnnnnnnnnnnnnnnnnnnnnnnnnnnnnnnnnnnnnnnnnnnnnnnnnnnnnnnnnnnnnnnnnnnnnnnnnnnnnnnnnnnnnnnnnnnnnnnnnnnnnnnnnnnnnnnnnnnnnnnnnnnnnnnnnnnnnnnnnnnnnnnnnnnnnnnnnnnnnnnnnnnnnnnnnnnnnnnnnnnnnnnnnnnnnnnnnnnnnnnnnnnnnnnnnnnnnnnnnnnnnnnnnnnnnnnnnnnnnnnnnnnnnnnnnnnnnnnnnnnnnnnnnnnnnnnnnnnnnnnnnnnnnnnnnnnnnnnnnnnnnnnnnnnnnnnnnnnnnnnnnnnnnnnnnnnnnnnnnnnnnnnnnnnnnnnnnnnnnnnnnnnnnnnnnnnnnnnnnnnnnnnnnnnnnnnnnnnnnnnnnnnnnnnnnnnnnnnnnnnnnnnnnnnnnnnnnnnnnnnnnnnnnnnnnnnnnnnnnnnnnnnnnnnnnnnnnnnnnnnnnnnnnnnnnnnnnnnnnnnnnnnnnnnnnnnnnnnnnnnnnnnnnnnnnnnnnnnnnnnnnnnnnnnnnnnnnnnnnnnnnnnnnnnnnnnnnnnnnnnnnnnnnnnnnnnnnnnnnnnnnnnnnnnnnnnnnnnnnnnnnnnnnnnnnnnnnnnnnnnnnnnnnnnnnnnnnnnnnnnnnnnnnnnnnnnnnnnnnnnnnnnnnnnnnnnnnnnnnnnnnnnnnnnnnnnnnnnnnnnnnnnnnnnnnnnnnnnnnnnnnnnnnnnnnnnnnnnnnnnnnnnnnnnnnnnnnnnnnnnnnnnnnnnnnnnnnnnnnnnnnnnnnnnnnnnnnnnnnnnnnnnnnnnnnnnnnnnnnnnnnnnnnnnnnnnnnnnnnnnnnnnnnnnnnnnnnnnnnnnnnnnnnnnnnnnnnnnnnnnnnnnnnnnnnnnnnnnnnnnnnnnnnnnnnnnnnnnnnnnnnnnnnnnnnnnnnnnnnnnnnnnnnnnnnnnnnnnnnnnnnnnnnnnnnnnnnnnnnnnnnnnnnnnnnnnnnnnnnnnnnnnnnnnnnnnnnnnnnnnnnnnnnnnnnnnnnnnnnnnnnnnnnnnnnnnnnnnnnnnnnnnnnnnnnnnnnnnnnnnnnnnnnnnnnnnnnnnnnnnnnnnnnnnnnnnnnnnnnnnnnnnnnnnnnnnnnnnnnnnnnnnnnnnnnnnnnnnnnnnnnnnnnnnnnnnnnnnnnnnnnnnnnnnnnnnnnnnnnnnnnnnnnnnnnnnnnnnnnnnnnnnnnnnnnnnnnnnnnnnnnnnnnnnnnnnnnnnnnnnnnnnnnnnnnnnnnnnnnnnnnnnnnnnnnnnnnnnnnnnnnnnnnnnnnnnnnnnnnnnnnnnnnnnnnnnnnnnnnnnnnnnnnnnnnnnnnnnnnnnnnnnnnnnnnnnnnnnnnnnnnnnnnnnnnnnnnnnnnnnnnnnnnnnnnnnnnnnnnnnnnnnnnnnnnnnnnnnnnnnnnnnnnnnnnnnnnnnnnnnnnnnnnnnnnnnnnnnnnnnnnnnnnnnnnnnnnnnnnnnnnnnnnnnnnnnnnnnnnnnnnnnnnnnnnnnnnnnnnnnnnnnnnnnnnnnnnnnnnnnnnnnnnnnnnnnnnnnnnnnnnnnnnnnnnnnnnnnnnnnnnnnnnnnnnnnnnnnnnnnnnnnnnnnnnnnnnnnnnnnnnnnnnnnnnnnnnnnnnnnnnnnnnnnnnnnnnnnnnnnnnnnnnnnnnnnnnnnnnnnnnnnnnnnnnnnnnnnnnnnnnnnnnnnnnnnnnnnnnnnnnnnnnnnnnnnnnnnnnnnnnnnnnnnnnnnnnnnnnnnnnnnnnnnnnnnnnnnnnnnnnnnnnnnnnnnnnnnnnnnnnnnnnnnnnnnnnnnnnnnnnnnnnnnnnnnnnnnnnnnnnnnnnnnnnnnnnnnnnnnnnnnnnnnnnnnnnnnnnnnnnnnnnnnnnnnnnnnnnnnnnnnnnnnnnnnnnnnnnnnnnnnnnnnnnnnnnnnnnnnnnnnnnnnnnnnnnnnnnnnnnnnnnnnnnnnnnnnnnnnnnnnnnnnnnnnnnnnnnnnnnnnnnnnnnnnnnnnnnnnnnnnnnnnnnnnnnnnnnnnnnnnnnnnnnnnnnnnnnnnnnnnnnnnnnnnnnnnnnnnnnnnnnnnnnnnnnnnnnnnnnnnnnnnnnnnnnnnnnnnnnnnnnnnnnnnnnnnnnnnnnnnnnnnnnnnnnnnnnnnnnnnnnnnnnnnnnnnnnnnnnnnnnnnnnnnnnnnnnnnnnnnnnnnnnnnnnnnnnnnnnnnnnnnnnnnnnnnnnnnnnnnnnnnnnnnnnnnnnnnnnnnnnnnnnnnnnnnnnnnnnnnnnnnnnnnnnnnnnnnnnnnnnnnnnnnnnnnnnnnnnnnnnnnnnnnnnnnnnnnnnnnnnnnnnnnnnnnnnnnnnnnnnnnnnnnnnnnnnnnnnnnnnnnnnnnnnnnnnnnnnnnnnnnnnnnnnnnnnnnnnnnnnnnnnnnnnnnnnnnnnnnnnnnnnnnnnnnnnnnnnnnnnnnnnnnnnnnnnnnnnnnnnnnnnnnnnnnnnnnnnnnnnnnnnnnnnnnnnnnnnnnnnnnnnnnnnnnnnnnnnnnnnnnnnnnnnnnnnnnnnnnnnnnnnnnnnnnnnnnnnnnnnnnnnnnnnnnnnnnnnnnnnnnnnnnnnnnnnnnnnnnnnnnnnnnnnnnnnnnnnnnnnnnnnnnnnnnnnnnnnnnnnnnnnnnnnnnnnnnnnnnnnnnnnnnnnnnnnnnnnnnnnnnnnnnnnnnnnnnnnnnnnnnnnnnnnnnnnnnnnnnnnnnnnnnnnnnnnnnnnnnnnnnnnnnnnnnnnnnnnnnnnnnnnnnnnnnnnnnnnnnnnnnnnnnnnnnnnnnnnnnnnnnnnnnnnnnnnnnnnnnnnnnnnnnnnnnnnnnnnnnnnnnnnnnnnnnnnnnnnnnnnnnnnnnnnnnnnnnnnnnnnnnnnnnnnnnnnnnnnnnnnnnnnnnnnnnnnnnnnnnnnnnnnnnnnnnnnnnnnnnnnnnnnnnnnnnnnnnnnnnnnnnnnnnnnnnnnnnnnnnnnnnnnnnnnnnnnnnnnnnnnnnnnnnnnnnnnnnnnnnnnnnnnnnnnnnnnnnnnnnnnnnnnnnnnnnnnnnnnnnnnnnnnnnnnnnnnnnnnnnnnnnnnnnnnnnnnnnnnnnnnnnnnnnnnnnnnnnnnnnnnnnnnnnnnnnnnnnnnnnnnnnnnnnnnnnnnnnnnnnnnnnnnnnnnnnnnnnnnnnnnnnnnnnnnnnnnnnnnnnnnnnnnnnnnnnnnnnnnnnnnnnnnnnnnnnnnnnnnnnnnnnnnnnnnnnnnnnnnnnnnnnnnnnnnnnnnnnnnnnnnnnnnnnnnnnnnnnnnnnnnnnnnnnnnnnnnnnnnnnnnnnnnnnnnnnnnnnnnnnnnnnnnnnnnnnnnnnnnnnnnnnnnnnnnnnnnnnnnnnnnnnnnnnnnnnnnnnnnnnnnnnnnnnnnnnnnnnnnnnnnnnnnnnnnnnnnnnnnnnnnnnnnnnnnnnnnnnnnnnnnnnnnnnnnnnnnnnnnnnnnnnnnnnnnnnnnnnnnnnnnnnnnnnnnnnnnnnnnnnnnnnnnnnnnnnnnnnnnnnnnnnnnnnnnnnnnnnnnnnnnnnnnnnnnnnnnnnnnnnnnnnnnnnnnnnnnnnnnnnnnnnnnnnnnnnnnnnnnnnnnnnnnnnnnnnnnnnnnnnnnnnnnnnnnnnnnnnnnnnnnnnnnnnnnnnnnnnnnnnnnnnnnnnnnnnnnnnnnnnnnnnnnnnnnnnnnnnnnnnnnnnnnnnnnnnnnnnnnnnnnnnnnnnnnnnnnnnnnnnnnnnnnnnnnnnnnnnnnnnnnnnnnnnnnnnnnnnnnnnnnnnnnnnnnnnnnnnnnnnnnnnnnnnnnnnnnnnnnnnnnnnnnnnnnnnnnnnnnnnnnnnnnnnnnnnnnnnnnnnnnnnnnnnnnnnnnnnnnnnnnnnnnnnnnnnnnnnnnnnnnnnnnnnnnnnnnnnnnnnnnnnnnnnnnnnnnnnnnnnnnnnnnnnnnnnnnnnnnnnnnnnnnnnnnnnnnnnnnnnnnnnnnnnnnnnnnnnnnnnnnnnnnnnnnnnnnnnnnnnnnnnnnnnnnnnnnnnnnnnnnnnnnnnnnnnnnnnnnnnnnnnnnnnnnnnnnnnnnnnnnnnnnnnnnnnnnnnnnnnnnnnnnnnnnnnnnnnnnnnnnnnnnnnnnnnnnnnnnnnnnnnnnnnnnnnnnnnnnnnnnnnnnnnnnnnnnnnnnnnnnnnnnnnnnnnnnnnnnnnnnnnnnnnnnnnnnnnnnnnnnnnnnnnnnnnnnnnnnnnnnnnnnnnnnnnnnnnnnnnnnnnnnnnnnnnnnnnnnnnnnnnnnnnnnnnnnnnnnnnnnnnnnnnnnnnnnnnnnnnnnnnnnnnnnnnnnnnnnnnnnnnnnnnnnnnnnnnnnnnnnnnnnnnnnnnnnnnnnnnnnnnnnnnnnnnnnnnnnnnnnnnnnnnnnnnnnnnnnnnnnnnnnnnnnnnnnnnnnnnnnnnnnnnnnnnnnnnnnnnnnnnnnnnnnnnnnnnnnnnnnnnnnnnnnnnnnnnnnnnnnnnnnnnnnnnnnnnnnnnnnnnnnnnnnnnnnnnnnnnnnnnnnnnnnnnnnnnnnnnnnnnnnnnnnnnnnnnnnnnnnnnnnnnnnnnnnnnnnnnnnnnnnnnnnnnnnnnnnnnnnnnnnnnnnnnnnnnnnnnnnnnnnnnnnnnnnnnnnnnnnnnnnnnnnnnnnnnnnnnnnnnnnnnnnnnnnnnnnnnnnnnnnnnnnnnnnnnnnnnnnnnnnnnnnnnnnnnnnnnnnnnnnnnnnnnnnnnnnnnnnnnnnnnnnnnnnnnnnnnnnnnnnnnnnnnnnnnnnnnnnnnnnnnnnnnnnnnnnnnnnnnnnnnnnnnnnnnnnnnnnnnnnnnnnnnnnnnnnnnnnnnnnnnnnnnnnnnnnnnnnnnnnnnnnnnnnnnnnnnnnnnnnnnnnnnnnnnnnnnnnnnnnnnnnnnnnnnnnnnnnnnnnnnnnnnnnnnnnnnnnnnnnnnnnnnnnnnnnnnnnnnnnnnnnnnnnnnnnnnnnnnnnnnnnnnnnnnnnnnnnnnnnnnnnnnnnnnnnnnnnnnnnnnnnnnnnnnnnnnnnnnnnnnnnnnnnnnnnnnnnnnnnnnnnnnnnnnnnnnnnnnnnnnnnnnnnnnnnnnnnnnnnnnnnnnnnnnnnnnnnnnnnnnnnnnnnnnnnnnnnnnnnnnnnnnnnnnnnnnnnnnnnnnnnnnnnnnnnnnnnnnnnnnnnnnnnnnnnnnnnnnnnnnnnnnnnnnnnnnnnnnnnnnnnnnnnnnnnnnnnnnnnnnnnnnnnnnnnnnnnnnnnnnnnnnnnnnnnnnnnnnnnnnnnnnnnnnnnnnnnnnnnnnnnnnnnnnnnnnnnnnnnnnnnnnnnnnnnnnnnnnnnnnnnnnnnnnnnnnnnnnnnnnnnnnnnnnnnnnnnnnnnnnnnnnnnnnnnnnnnnnnnnnnnnnnnnnnnnnnnnnnnnnnnnnnnnnnnnnnnnnnnnnnnnnnnnnnnnnnnnnnnnnnnnnnnnnnnnnnnnnnnnnnnnnnnnnnnnnnnnnnnnnnnnnnnnnnnnnnnnnnnnnnnnnnnnnnnnnnnnnnnnnnnnnnnnnnnnnnnnnnnnnnnnnnnnnnnnnnnnnnnnnnnnnnnnnnnnnnnnnnnnnnnnnnnnnnnnnnnnnnnnnnnnnnnnnnnnnnnnnnnnnnnnnnnnnnnnnnnnnnnnnnnnnnnnnnnnnnnnnnnnnnnnnnnnnnnnnnnnnnnnnnnnnnnnnnnnnnnnnnnnnnnnnnnnnnnnnnnnnnnnnnnnnnnnnnnnnnnnnnnnnnnnnnnnnnnnnnnnnnnnnnnnnnnnnnnnnnnnnnnnnnnnnnnnnnnnnnnnnnnnnnnnnnnnnnnnnnnnnnnnnnnnnnnnnnnnnnnnnnnnnnnnnnnnnnnnnnnnnnnnnnnnnnnnnnnnnnnnnnnnnnnnnnnnnnnnnnnnnnnnnnnnnnnnnnnnnnnnnnnnnnnnnnnnnnnnnnnnnnnnnnnnnnnnnnnnnnnnnnnnnnnnnnnnnnnnnnnnnnnnnnnnnnnnnnnnnnnnnnnnnnnnnnnnnnnnnnnnnnnnnnnnnnnnnnnnnnnnnnnnnnnnnnnnnnnnnnnnnnnnnnnnnnnnnnnnnnnnnnnnnnnnnnnnnnnnnnnnnnnnnnnnnnnnnnnnnnnnnnnnnnnnnnnnnnnnnnnnnnnnnnnnnnnnnnnnnnnnnnnnnnnnnnnnnnnnnnnnnnnnnnnnnnnnnnnnnnnnnnnnnnnnnnnnnnnnnnnnnnnnnnnnnnnnnnnnnnnnnnnnnnnnnnnnnnnnnnnnnnnnnnnnnnnnnnnnnnnnnnnnnnnnnnnnnnnnnnnnnnnnnnnnnnnnnnnnnnnnnnnnnnnnnnnnnnnnnnnnnnnnnnnnnnnnnnnnnnnnnnnnnnnnnnnnnnnnnnnnnnnnnnnnnnnnnnnnnnnnnnnnnnnnnnnnnnnnnnnnnnnnnnnnnnnnnnnnnnnnnnnnnnnnnnnnnnnnnnnnnnnnnnnnnnnnnnnnnnnnnnnnnnnnnnnnnnnnnnnnnnnnnnnnnnnnnnnnnnnnnnnnnnnnnnnnnnnnnnnnnnnnnnnnnnnnnnnnnnnnnnnnnnnnnnnnnnnnnnnnnnnnnnnnnnnnnnnnnnnnnnnnnnnnnnnnnnnnnnnnnnnnnnnnnnnnnnnnnnnnnnnnnnnnnnnnnnnnnnnnnnnnnnnnnnnnnnnnnnnnnnnnnnnnnnnnnnnnnnnnnnnnnnnnnnnnnnnnnnnnnnnnnnnnnnnnnnnnnnnnnnnnnnnnnnnnnnnnnnnnnnnnnnnnnnnnnnnnnnnnnnnnnnnnnnnnnnnnnnnnnnnnnnnnnnnnnnnnnnnnnnnnnnnnnnnnnnnnnnnnnnnnnnnnnnnnnnnnnnnnnnnnnnnnnnnnnnnnnnnnnnnnnnnnnnnnnnnnnnnnnnnnnnnnnnnnnnnnnnnnnnnnnnnnnnnnnnnnnnnnnnnnnnnnnnnnnnnnnnnnnnnnnnnnnnnnnnnnnnnnnnnnnnnnnnnnnnnnnnnnnnnnnnnnnnnnnnnnnnnnnnnnnnnnnnnnnnnnnnnnnnnnnnnnnnnnnnnnnnnnnnnnnnnnnnnnnnnnnnnnnnnnnnnnnnnnnnnnnnnnnnnnnnnnnnnnnnnnnnnnnnnnnnnnnnnnnnnnnnnnnnnnnnnnnnnnnnnnnnnnnnnnnnnnnnnnnnnnnnnnnnnnnnnnnnnnnnnnnnnnnnnnnnnnnnnnnnnnnnnnnnnnnnnnnnnnnnnnnnnnnnnnnnnnnnnnnnnnnnnnnnnnnnnnnnnnnnnnnnnnnnnnnnnnnnnnnnnnnnnnnnnnnnnnnnnnnnnnnnnnnnnnnnnnnnnnnnnnnnnnnnnnnnnnnnnnnnnnnnnnnnnnnnnnnnnnnnnnnnnnnnnnnnnnnnnnnnnnnnnnnnnnnnnnnnnnnnnnnnnnnnnnnnnnnnnnnnnnnnnnnnnnnnnnnnnnnnnnnnnnnnnnnnnnnnnnnnnnnnnnnnnnnnnnnnnnnnnnnnnnnnnnnnnnnnnnnnnnnnnnnnnnnnnnnnnnnnnnnnnnnnnnnnnnnnnnnnnnnnnnnnnnnnnnnnnnnnnnnnnnnnnnnnnnnnnnnnnnnnnnnnnnnnnnnnnnnnnnnnnnnnnnnnnnnnnnnnnnnnnnnnnnnnnnnnnnnnnnnnnnnnnnnnnnnnnnnnnnnnnnnnnnnnnnnnnnnnnnnnnnnnnnnnnnnnnnnnnnnnnnnnnnnnnnnnnnnnnnnnnnnnnnnnnnnnnnnnnnnnnnnnnnnnnnnnnnnnnnnnnnnnnnnnnnnnnnnnnnnnnnnnnnnnnnnnnnnnnnnnnnnnnnnnnnnnnnnnnnnnnnnnnnnnnnnnnnnnnnnnnnnnnnnnnnnnnnnnnnnnnnnnnnnnnnnnnnnnnnnnnnnnnnnnnnnnnnnnnnnnnnnnnnnnnnnnnnnnnnnnnnnnnnnnnnnnnnnnnnnnnnnnnnnnnnnnnnnnnnnnnnnnnnnnnnnnnnnnnnnnnnnnnnnnnnnnnnnnnnnnnnnnnnnnnnnnnnnnnnnnnnnnnnnnnnnnnnnnnnnnnnnnnnnnnnnnnnnnnnnnnnnnnnnnnnnnnnnnnnnnnnnnnnnnnnnnnnnnnnnnnnnnnnnnnnnnnnnnnnnnnnnnnnnnnnnnnnnnnnnnnnnnnnnnnnnnnnnnnnnnnnnnnnnnnnnnnnnnnnnnnnnnnnnnnnnnnnnnnnnnnnnnnnnnnnnnnnnnnnnnnnnnnnnnnnnnnnnnnnnnnnnnnnnnnnnnnnnnnnnnnnnnnnnnnnnnnnnnnnnnnnnnnnnnnnnnnnnnnnnnnnnnnnnnnnnnnnnnnnnnnnnnnnnnnnnnnnnnnnnnnnnnnnnnnnnnnnnnnnnnnnnnnnnnnnnnnnnnnnnnnnnnnnnnnnnnnnnnnnnnnnnnnnnnnnnnnnnnnnnnnnnnnnnnnnnnnnnnnnnnnnnnnnnnnnnnnnnnnnnnnnnnnnnnnnnnnnnnnnnnnnnnnnnnnnnnnnnnnnnnnnnnnnnnnnnnnnnnnnnnnnnnnnnnnnnnnnnnnnnnnnnnnnnnnnnnnnnnnnnnnnnnnnnnnnnnnnnnnnnnnnnnnnnnnnnnnnnnnnnnnnnnnnnnnnnnnnnnnnnnnnnnnnnnnnnnnnnnnnnnnnnnnnnnnnnnnnnnnnnnnnnnnnnnnnnnnnnnnnnnnnnnnnnnnnnnnnnnnnnnnnnnnnnnnnnnnnnnnnnnnnnnnnnnnnnnnnnnnnnnnnnnnnnnnnnnnnnnnnnnnnnnnnnnnnnnnnnnnnnnnnnnnnnnnnnnnnnnnnnnnnnnnnnnnnnnnnnnnnnnnnnnnnnnnnnnnnnnnnnnnnnnnnnnnnnnnnnnnnnnnnnnnnnnnnnnnnnnnnnnnnnnnnnnnnnnnnnnnnnnnnnnnnnnnnnnnnnnnnnnnnnnnnnnnnnnnnnnnnnnnnnnnnnnnnnnnnnnnnnnnnnnnnnnnnnnnnnnnnnnnnnnnnnnnnnnnnnnnnnnnnnnnnnnnnnnnnnnnnnnnnnnnnnnnnnnnnnnnnnnnnnnnnnnnnnnnnnnnnnnnnnnnnnnnnnnnnnnnnnnnnnnnnnnnnnnnnnnnnnnnnnnnnnnnnnnnnnnnnnnnnnnnnnnnnnnnnnnnnnnnnnnnnnnnnnnnnnnnnnnnnnnnnnnnnnnnnnnnnnnnnnnnnnnnnnnnnnnnnnnnnnnnnnnnnnnnnnnnnnnnnnnnnnnnnnnnnnnnnnnnnnnnnnnnnnnnnnnnnnnnnnnnnnnnnnnnnnnnnnnnnnnnnnnnnnnnnnnnnnnnnnnnnnnnnnnnnnnnnnnnnnnnnnnnnnnnnnnnnnnnnnnnnnnnnnnnnnnnnnnnnnnnnnnnnnnnnnnnnnnnnnnnnnnnnnnnnnnnnnnnnnnnnnnnnnnnnnnnnnnnnnnnnnnnnnnnnnnnnnnnnnnnnnnnnnnnnnnnnnnnnnnnnnnnnnnnnnnnnnnnnnnnnnnnnnnnnnnnnnnnnnnnnnnnnnnnnnnnnnnnnnnnnnnnnnnnnnnnnnnnnnnnnnnnnnnnnnnnnnnnnnnnnnnnnnnnnnnnnnnnnnnnnnnnnnnnnnnnnnnnnnnnnnnnnnnnnnnnnnnnnnnnnnnnnnnnnnnnnnnnnnnnnnnnnnnnnnnnnnnnnnnnnnnnnnnnnnnnnnnnnnnnnnnnnnnnnnnnnnnnnnnnnnnnnnnnnnnnnnnnnnnnnnnnnnnnnnnnnnnnnnnnnnnnnnnnnnnnnnnnnnnnnnnnnnnnnnnnnnnnnnnnnnnnnnnnnnnnnnnnnnnnnnnnnnnnnnnnnnnnnnnnnnnnnnnnnnnnnnnnnnnnnnnnnnnnnnnnnnnnnnnnnnnnnnnnnnnnnnnnnnnnnnnnnnnnnnnnnnnnnnnnnnnnnnnnnnnnnnnnnnnnnnnnnnnnnnnnnnnnnnnnnnnnnnnnnnnnnnnnnnnnnnnnnnnnnnnnnnnnnnnnnnnnnnnnnnnnnnnnnnnnnnnnnnnnnnnnnnnnnnnnnnnnnnnnnnnnnnnnnnnnnnnnnnnnnnnnnnnnnnnnnnnnnnnnnnnnnnnnnnnnnnnnnnnnnnnnnnnnnnnnnnnnnnnnnnnnnnnnnnnnnnnnnnnnnnnnnnnnnnnnnnnnnnnnnnnnnnnnnnnnnnnnnnnnnnnnnnnnnnnnnnnnnnnnnnnnnnnnnnnnnnnnnnnnnnnnnnnnnnnnnnnnnnnnnnnnnnnnnnnnnnnnnnnnnnnnnnnnnnnnnnnnnnnnnnnnnnnnnnnnnnnnnnnnnnnnnnnnnnnnnnnnnnnnnnnnnnnnnnnnnnnnnnnnnnnnnnnnnnnnnnnnnnnnnnnnnnnnnnnnnnnnnnnnnnnnnnnnnnnnnnnnnnnnnnnnnnnnnnnnnnnnnnnnnnnnnnnnnnnnnnnnnnnnnnnnnnnnnnnnnnnnnnnnnnnnnnnnnnnnnnnnnnnnnnnnnnnnnnnnnnnnnnnnnnnnnnnnnnnnnnnnnnnnnnnnnnnnnnnnnnnnnnnnnnnnnnnnnnnnnnnnnnnnnnnnnnnnnnnnnnnnnnnnnnnnnnnnnnnnnnnnnnnnnnnnnnnnnnnnnnnnnnnnnnnnnnnnnnnnnnnnnnnnnnnnnnnnnnnnnnnnnnnnnnnnnnnnnnnnnnnnnnnnnnnnnnnnnnnnnnnnnnnnnnnnnnnnnnnnnnnnnnnnnnnnnnnnnnnnnnnnnnnnnnnnnnnnnnnnnnnnnnnnnnnnnnnnnnnnnnnnnnnnnnnnnnnnnnnnnnnnnnnnnnnnnnnnnnnnnnnnnnnnnnnnnnnnnnnnnnnnnnnnnnnnnnnnnnnnnnnnnnnnnnnnnnnnnnnnnnnnnnnnnnnnnnnnnnnnnnnnnnnnnnnnnnnnnnnnnnnnnnnnnnnnnnnnnnnnnnnnnnnnnnnnnnnnnnnnnnnnnnnnnnnnnnnnnnnnnnnnnnnnnnnnnnnnnnnnnnnnnnnnnnnnnnnnnnnnnnnnnnnnnnnnnnnnnnnnnnnnnnnnnnnnnnnnnnnnnnnnnnnnnnnnnnnnnnnnnnnnnnnnnnnnnnnnnnnnnnnnnnnnnnnnnnnnnnnnnnnnnnnnnnnnnnnnnnnnnnnnnnnnnnnnnnnnnnnnnnnnnnnnnnnnnnnnnnnnnnnnnnnnnnnnnnnnnnnnnnnnnnnnnnnnnnnnnnnnnnnnnnnnnnnnnnnnnnnnnnnnnnnnnnnnnnnnnnnnnnnnnnnnnnnnnnnnnnnnnnnnnnnnnnnnnnnnnnnnnnnnnnnnnnnnnnnnnnnnnnnnnnnnnnnnnnnnnnnnnnnnnnnnnnnnnnnnnnnnnnnnnnnnnnnnnnnnnnnnnnnnnnnnnnnnnnnnnnnnnnnnnnnnnnnnnnnnnnnnnnnnnnnnnnnnnnnnnnnnnnnnnnnnnnnnnnnnnnnnnnnnnnnnnnnnnnnnnnnnnnnnnnnnnnnnnnnnnnnnnnnnnnnnnnnnnnnnnnnnnnnnnnnnnnnnnnnnnnnnnnnnnnnnnnnnnnnnnnnnnnnnnnnnnnnnnnnnnnnnnnnnnnnnnnnnnnnnnnnnnnnnnnnnnnnnnnnnnnnnnnnnnnnnnnnnnnnnnnnnnnnnnnnnnnnnnnnnnnnnnnnnnnnnnnnnnnnnnnnnnnnnnnnnnnnnnnnnnnnnnnnnnnnnnnnnnnnnnnnnnnnnnnnnnnnnnnnnnnnnnnnnnnnnnnnnnnnnnnnnnnnnnnnnnnnnnnnnnnnnnnnnnnnnnnnnnnnnnnnnnnnnnnnnnnnnnnnnnnnnnnnnnnnnnnnnnnnnnnnnnnnnnnnnnnnnnnnnnnnnnnnnnnnnnnnnnnnnnnnnnnnnnnnnnnnnnnnnnnnnnnnnnnnnnnnnnnnnnnnnnnnnnnnnnnnnnnnnnnnnnnnnnnnnnnnnnnnnnnnnnnnnnnnnnnnnnnnnnnnnnnnnnnnnnnnnnnnnnnnnnnnnnnnnnnnnnnnnnnnnnnnnnnnnnnnnnnnnnnnnnnnnnnnnnnnnnnnnnnnnnnnnnnnnnnnnnnnnnnnnnnnnnnnnnnnnnnnnnnnnnnnnnnnnnnnnnnnnnnnnnnnnnnnnnnnnnnnnnnnnnnnnnnnnnnnnnnnnnnnnnnnnnnnnnnnnnnnnnnnnnnnnnnnnnnnnnnnnnnnnnnnnnnnnnnnnnnnnnnnnnnnnnnnnnnnnnnnnnnnnnnnnnnnnnnnnnnnnnnnnnnnnnnnnnnnnnnnnnnnnnnnnnnnnnnnnnnnnnnnnnnnnnnnnnnnnnnnnnnnnnnnnnnnnnnnnnnnnnnnnnnnnnnnnnnnnnnnnnnnnnnnnnnnnnnnnnnnnnnnnnnnnnnnnnnnnnnnnnnnnnnnnnnnnnnnnnnnnnnnnnnnnnnnnnnnnnnnnnnnnnnnnnnnnnnnnnnnnnnnnnnnnnnnnnnnnnnnnnnnnnnnnnnnnnnnnnnnnnnnnnnnnnnnnnnnnnnnnnnnnnnnnnnnnnnnnnnnnnnnnnnnnnnnnnnnnnnnnnnnnnnnnnnnnnnnnnnnnnnnnnnnnnnnnnnnnnnnnnnnnnnnnnnnnnnnnnnnnnnnnnnnnnnnnnnnnnnnnnnnnnnnnnnnnnnnnnnnnnnnnnnnnnnnnnnnnnnnnnnnnnnnnnnnnnnnnnnnnnnnnnnnnnnnnnnnnnnnnnnnnnnnnnnnnnnnnnnnnnnnnnnnnnnnnnnnnnnnnnnnnnnnnnnnnnnnnnnnnnnnnnnnnnnnnnnnnnnnnnnnnnnnnnnnnnnnnnnnnnnnnnnnnnnnnnnnnnnnnnnnnnnnnnnnnnnnnnnnnnnnnnnnnnnnnnnnnnnnnnnnnnnnnnnnnnnnnnnnnnnnnnnnnnnnnnnnnnnnnnnnnnnnnnnnnnnnnnnnnnnnnnnnnnnnnnnnnnnnnnnnnnnnnnnnnnnnnnnnnnnnnnnnnnnnnnnnnnnnnnnnnnnnnnnnnnnnnnnnnnnnnnnnnnnnnnnnnnnnnnnnnnnnnnnnnnnnnnnnnnnnnnnnnnnnnnnnnnnnnnnnnnnnnnnnnnnnnnnnnnnnnnnnnnnnnnnnnnnnnnnnnnnnnnnnnnnnnnnnnnnnnnnnnnnnnnnnnnnnnnnnnnnnnnnnnnnnnnnnnnnnnnnnnnnnnnnnnnnnnnnnnnnnnnnnnnnnnnnnnnnnnnnnnnnnnnnnnnnnnnnnnnnnnnnnnnnnnnnnnnnnnnnnnnnnnnnnnnnnnnnnnnnnnnnnnnnnnnnnnnnnnnnnnnnnnnnnnnnnnnnnnnnnnnnnnnnnnnnnnnnnnnnnnnnnnnnnnnnnnnnnnnnnnnnnnnnnnnnnnnnnnnnnnnnnnnnnnnnnnnnnnnnnnnnnnnnnnnnnnnnnnnnnnnnnnnnnnnnnnnnnnnnnnnnnnnnnnnnnnnnnnnnnnnnnnnnnnnnnnnnnnnnnnnnnnnnnnnnnnnnnnnnnnnnnnnnnnnnnnnnnnnnnnnnnnnnnnnnnnnnnnnnnnnnnnnnnnnnnnnnnnnnnnnnnnnnnnnnnnnnnnnnnnnnnnnnnnnnnnnnnnnnnnnnnnnnnnnnnnnnnnnnnnnnnnnnnnnnnnnnnnnnnnnnnnnnnnnnnnnnnnnnnnnnnnnnnnnnnnnnnnnnnnnnnnnnnnnnnnnnnnnnnnnnnnnnnnnnnnnnnnnnnnnnnnnnnnnnnnnnnnnnnnnnnnnnnnnnnnnnnnnnnnnnnnnnnnnnnnnnnnnnnnnnnnnnnnnnnnnnnnnnnnnnnnnnnnnnnnnnnnnnnnnnnnnnnnnnnnnnnnnnnnnnnnnnnnnnnnnnnnnnnnnnnnnnnnnnnnnnnnnnnnnnnnnnnnnnnnnnnnnnnnnnnnnnnnnnnnnnnnnnnnnnnnnnnnnnnnnnnnnnnnnnnnnnnnnnnnnnnnnnnnnnnnnnnnnnnnnnnnnnnnnnnnnnnnnnnnnnnnnnnnnnnnnnnnnnnnnnnnnnnnnnnnnnnnnnnnnnnnnnnnnnnnnnnnnnnnnnnnnnnnnnnnnnnnnnnnnnnnnnnnnnnnnnnnnnnnnnnnnnnnnnnnnnnnnnnnnnnnnnnnnnnnnnnnnnnnnnnnnnnnnnnnnnnnnnnnnnnnnnnnnnnnnnnnnnnnnnnnnnnnnnnnnnnnnnnnnnnnnnnnnnnnnnnnnnnnnnnnnnnnnnnnnnnnnnnnnnnnnnnnnnnnnnnnnnnnnnnnnnnnnnnnnnnnnnnnnnnnnnnnnnnnnnnnnnnnnnnnnnnnnnnnnnnnnnnnnnnnnnnnnnnnnnnnnnnnnnnnnnnnnnnnnnnnnnnnnnnnnnnnnnnnnnnnnnnnnnnnnnnnnnnnnnnnnnnnnnnnnnnnnnnnnnnnnnnnnnnnnnnnnnnnnnnnnnnnnnnnnnnnnnnnnnnnnnnnnnnnnnnnnnnnnnnnnnnnnnnnnnnnnnnnnnnnnnnnnnnnnnnnnnnnnnnnnnnnnnnnnnnnnnnnnnnnnnnnnnnnnnnnnnnnnnnnnnnnnnnnnnnnnnnnnnnnnnnnnnnnnnnnnnnnnnnnnnnnnnnnnnnnnnnnnnnnnnnnnnnnnnnnnnnnnnnnnnnnnnnnnnnnnnnnnnnnnnnnnnnnnnnnnnnnnnnnnnnnnnnnnnnnnnnnnnnnnnnnnnnnnnnnnnnnnnnnnnnnnnnnnnnnnnnnnnnnnnnnnnnnnnnnnnnnnnnnnnnnnnnnnnnnnnnnnnnnnnnnnnnnnnnnnnnnnnnnnnnnnnnnnnnnnnnnnnnnnnnnnnnnnnnnnnnnnnnnnnnnnnnnnnnnnnnnnnnnnnnnnnnnnnnnnnnnnnnnnnnnnnnnnnnnnnnnnnnnnnnnnnnnnnnnnnnnnnnnnnnnnnnnnnnnnnnnnnnnnnnnnnnnnnnnnnnnnnnnnnnnnnnnnnnnnnnnnnnnnnnnnnnnnnnnnnnnnnnnnnnnnnnnnnnnnnnnnnnnnnnnnnnnnnnnnnnnnnnnnnnnnnnnnnnnnnnnnnnnnnnnnnnnnnnnnnnnnnnnnnnnnnnnnnnnnnnnnnnnnnnnnnnnnnnnnnnnnnnnnnnnnnnnnnnnnnnnnnnnnnnnnnnnnnnnnnnnnnnnnnnnnnnnnnnnnnnnnnnnnnnnnnnnnnnnnnnnnnnnnnnnnnnnnnnnnnnnnnnnnnnnnnnnnnnnnnnnnnnnnnnnnnnnnnnnnnnnnnnnnnnnnnnnnnnnnnnnnnnnnnnnnnnnnnnnnnnnnnnnnnnnnnnnnnnnnnnnnnnnnnnnnnnnnnnnnnnnnnnnnnnnnnnnnnnnnnnnnnnnnnnnnnnnnnnnnnnnnnnnnnnnnnnnnnnnnnnnnnnnnnnnnnnnnnnnnnnnnnnnnnnnnnnnnnnnnnnnnnnnnnnnnnnnnnnnnnnnnnnnnnnnnnnnnnnnnnnnnnnnnnnnnnnnnnnnnnnnnnnnnnnnnnnnnnnnnnnnnnnnnnnnnnnnnnnnnnnnnnnnnnnnnnnnnnnnnnnnnnnnnnnnnnnnnnnnnnnnnnnnnnnnnnnnnnnnnnnnnnnnnnnnnnnnnnnnnnnnnnnnnnnnnnnnnnnnnnnnnnnnnnnnnnnnnnnnnnnnnnnnnnnnnnnnnnnnnnnnnnnnnnnnnnnnnnnnnnnnnnnnnnnnnnnnnnnnnnnnnnnnnnnnnnnnnnnnnnnnnnnnnnnnnnnnnnnnnnnnnnnnnnnnnnnnnnnnnnnnnnnnnnnnnnnnnnnnnnnnnnnnnnnnnnnnnnnnnnnnnnnnnnnnnnnnnnnnnnnnnnnnnnnnnnnnnnnnnnnnnnnnnnnnnnnnnnnnnnnnnnnnnnnnnnnnnnnnnnnnnnnnnnnnnnnnnnnnnnnnnnnnnnnnnnnnnnnnnnnnnnnnnnnnnnnnnnnnnnnnnnnnnnnnnnnnnnnnnnnnnnnnnnnnnnnnnnnnnnnnnnnnnnnnnnnnnnnnnnnnnnnnnnnnnnnnnnnnnnnnnnnnnnnnnnnnnnnnnnnnnnnnnnnnnnnnnnnnnnnnnnnnnnnnnnnnnnnnnnnnnnnnnnnnnnnnnnnnnnnnnnnnnnnnnnnnnnnnnnnnnnnnnnnnnnnnnnnnnnnnnnnnnnnnnnnnnnnnnnnnnnnnnnnnnnnnnnnnnnnnnnnnnnnnnnnnnnnnnnnnnnnnnnnnnnnnnnnnnnnnnnnnnnnnnnnnnnnnnnnnnnnnnnnnnnnnnnnnnnnnnnnnnnnnnnnnnnnnnnnnnnnnnnnnnnnnnnnnnnnnnnnnnnnnnnnnnnnnnnnnnnnnnnnnnnnnnnnnnnnnnnnnnnnnnnnnnnnnnnnnnnnnnnnnnnnnnnnnnnnnnnnnnnnnnnnnnnnnnnnnnnnnnnnnnnnnnnnnnnnnnnnnnnnnnnnnnnnnnnnnnnnnnnnnnnnnnnnnnnnnnnnnnnnnnnnnnnnnnnnnnnnnnnnnnnnnnnnnnnnnnnnnnnnnnnnnnnnnnnnnnnnnnnnnnnnnnnnnnnnnnnnnnnnnnnnnnnnnnnnnnnnnnnnnnnnnnnnnnnnnnnnnnnnnnnnnnnnnnnnnnnnnnnnnnnnnnnnnnnnnnnnnnnnnnnnnnnnnnnnnnnnnnnnnnnnnnnnnnnnnnnnnnnnnnnnnnnnnnnnnnnnnnnnnnnnnnnnnnnnnnnnnnnnnnnnnnnnnnnnnnnnnnnnnnnnnnnnnnnnnnnnnnnnnnnnnnnnnnnnnnnnnnnnnnnnnnnnnnnnnnnnnnnnnnnnnnnnnnnnnnnnnnnnnnnnnnnnnnnnnnnnnnnnnnnnnnnnnnnnnnnnnnnnnnnnnnnnnnnnnnnnnnnnnnnnnnnnnnnnnnnnnnnnnnnnnnnnnnnnnnnnnnnnnnnnnnnnnnnnnnnnnnnnnnnnnnnnnnnnnnnnnnnnnnnnnnnnnnnnnnnnnnnnnnnnnnnnnnnnnnnnnnnnnnnnnnnnnnnnnnnnnnnnnnnnnnnnnnnnnnnnnnnnnnnnnnnnnnnnnnnnnnnnnnnnnnnnnnnnnnnnnnnnnnnnnnnnnnnnnnnnnnnnnnnnnnnnnnnnnnnnnnnnnnnnnnnnnnnnnnnnnnnnnnnnnnnnnnnnnnnnnnnnnnnnnnnnnnnnnnnnnnnnnnnnnnnnnnnnnnnnnnnnnnnnnnnnnnnnnnnnnnnnnnnnnnnnnnnnnnnnnnnnnnnnnnnnnnnnnnnnnnnnnnnnnnnnnnnnnnnnnnnnnnnnnnnnnnnnnnnnnnnnnnnnnnnnnnnnnnnnnnnnnnnnnnnnnnnnnnnnnnnnnnnnnnnnnnnnnnnnnnnnnnnnnnnnnnnnnnnnnnnnnnnnnnnnnnnnnnnnnnnnnnnnnnnnnnnnnnnnnnnnnnnnnnnnnnnnnnnnnnnnnnnnnnnnnnnnnnnnnnnnnnnnnnnnnnnnnnnnnnnnnnnnnnnnnnnnnnnnnnnnnnnnnnnnnnnnnnnnnnnnnnnnnnnnnnnnnnnnnnnnnnnnnnnnnnnnnnnnnnnnnnnnnnnnnnnnnnnnnnnnnnnnnnnnnnnnnnnnnnnnnnnnnnnnnnnnnnnnnnnnnnnnnnnnnnnnnnnnnnnnnnnnnnnnnnnnnnnnnnnnnnnnnnnnnnnnnnnnnnnnnnnnnnnnnnnnnnnnnnnnnnnnnnnnnnnnnnnnnnnnnnnnnnnnnnnnnnnnnnnnnnnnnnnnnnnnnnnnnnnnnnnnnnnnnnnnnnnnnnnnnnnnnnnnnnnnnnnnnnnnnnnnnnnnnnnnnnnnnnnnnnnnnnnnnnnnnnnnnnnnnnnnnnnnnnnnnnnnnnnnnnnnnnnnnnnnnnnnnnnnnnnnnnnnnnnnnnnnnnnnnnnnnnnnnnnnnnnnnnnnnnnnnnnnnnnnnnnnnnnnnnnnnnnnnnnnnnnnnnnnnnnnnnnnnnnnnnnnnnnnnnnnnnnnnnnnnnnnnnnnnnnnnnnnnnnnnnnnnnnnnnnnnnnnnnnnnnnnnnnnnnnnnnnnnnnnnnnnnnnnnnnnnnnnnnnnnnnnnnnnnnnnnnnnnnnnnnnnnnnnnnnnnnnnnnnnnnnnnnnnnnnnnnnnnnnnnnnnnnnnnnnnnnnnnnnnnnnnnnnnnnnnnnnnnnnnnnnnnnnnnnnnnnnnnnnnnnnnnnnnnnnnnnnnnnnnnnnnnnnnnnnnnnnnnnnnnnnnnnnnnnnnnnnnnnnnnnnnnnnnnnnnnnnnnnnnnnnnnnnnnnnnnnnnnnnnnnnnnnnnnnnnnnnnnnnnnnnnnnnnnnnnnnnnnnnnnnnnnnnnnnnnnnnnnnnnnnnnnnnnnnnnnnnnnnnnnnnnnnnnnnnnnnnnnnnnnnnnnnnnnnnnnnnnnnnnnnnnnnnnnnnnnnnnnnnnnnnnnnnnnnnnnnnnnnnnnnnnnnnnnnnnnnnnnnnnnnnnnnnnnnnnnnnnnnnnnnnnnnnnnnnnnnnnnnnnnnnnnnnnnnnnnnnnnnnnnnnnnnnnnnnnnnnnnnnnnnnnnnnnnnnnnnnnnnnnnnnnnnnnnnnnnnnnnnnnnnnnnnnnnnnnnnnnnnnnnnnnnnnnnnnnnnnnnnnnnnnnnnnnnnnnnnnnnnnnnnnnnnnnnnnnnnnnnnnnnnnnnnnnnnnnnnnnnnnnnnnnnnnnnnnnnnnnnnnnnnnnnnnnnnnnnnnnnnnnnnnnnnnnnnnnnnnnnnnnnnnnnnnnnnnnnnnnnnnnnnnnnnnnnnnnnnnnnnnnnnnnnnnnnnnnnnnnnnnnnnnnnnnnnnnnnnnnnnnnnnnnnnnnnnnnnnnnnnnnnnnnnnnnnnnnnnnnnnnnnnnnnnnnnnnnnnnnnnnnnnnnnnnnnnnnnnnnnnnnnnnnnnnnnnnnnnnnnnnnnnnnnnnnnnnnnnnnnnnnnnnnnnnnnnnnnnnnnnnnnnnnnnnnnnnnnnnnnnnnnnnnnnnnnnnnnnnnnnnnnnnnnnnnnnnnnnnnnnnnnnnnnnnnnnnnnnnnnnnnnnnnnnnnnnnnnnnnnnnnnnnnnnnnnnnnnnnnnnnnnnnnnnnnnnnnnnnnnnnnnnnnnnnnnnnnnnnnnnnnnnnnnnnnnnnnnnnnnnnnnnnnnnnnnnnnnnnnnnnnnnnnnnnnnnnnnnnnnnnnnnnnnnnnnnnnnnnnnnnnnnnnnnnnnnnnnnnnnnnnnnnnnnnnnnnnnnnnnnnnnnnnnnnnnnnnnnnnnnnnnnnnnnnnnnnnnnnnnnnnnnnnnnnnnnnnnnnnnnnnnnnnnnnnnnnnnnnnnnnnnnnnnnnnnnnnnnnnnnnnnnnnnnnnnnnnnnnnnnnnnnnnnnnnnnnnnnnnnnnnnnnnnnnnnnnnnnnnnnnnnnnnnnnnnnnnnnnnnnnnnnnnnnnnnnnnnnnnnnnnnnnnnnnnnnnnnnnnnnnnnnnnnnnnnnnnnnnnnnnnnnnnnnnnnnnnnnnnnnnnnnnnnnnnnnnnnnnnnnnnnnnnnnnnnnnnnnnnnnnnnnnnnnnnnnnnnnnnnnnnnnnnnnnnnnnnnnnnnnnnnnnnnnnnnnnnnnnnnnnnnnnnnnnnnnnnnnnnnnnnnnnnnnnnnnnnnnnnnnnnnnnnnnnnnnnnnnnnnnnnnnnnnnnnnnnnnnnnnnnnnnnnnnnnnnnnnnnnnnnnnnnnnnnnnnnnnnnnnnnnnnnnnnnnnnnnnnnnnnnnnnnnnnnnnnnnnnnnnnnnnnnnnnnnnnnnnnnnnnnnnnnnnnnnnnnnnnnnnnnnnnnnnnnnnnnnnnnnnnnnnnnnnnnnnnnnnnnnnnnnnnnnnnnnnnnnnnnnnnnnnnnnnnnnnnnnnnnnnnnnnnnnnnnnnnnnnnnnnnnnnnnnnnnnnnnnnnnnnnnnnnnnnnnnnnnnnnnnnnnnnnnnnnnnnnnnnnnnnnnnnnnnnnnnnnnnnnnnnnnnnnnnnnnnnnnnnnnnnnnnnnnnnnnnnnnnnnnnnnnnnnnnnnnnnnnnnnnnnnnnnnnnnnnnnnnnnnnnnnnnnnnnnnnnnnnnnnnnnnnnnnnnnnnnnnnnnnnnnnnnnnnnnnnnnnnnnnnnnnnnnnnnnnnnnnnnnnnnnnnnnnnnnnnnnnnnnnnnnnnnnnnnnnnnnnnnnnnnnnnnnnnnnnnnnnnnnnnnnnnnnnnnnnnnnnnnnnnnnnnnnnnnnnnnnnnnnnnnnnnnnnnnnnnnnnnnnnnnnnnnnnnnnnnnnnnnnnnnnnnnnnnnnnnnnnnnnnnnnnnnnnnnnnnnnnnnnnnnnnnnnnnnnnnnnnngatcacagaggctgggctgctccccaccctctgcacacctcctgcttctaacagcagagctgccaggccaggccctcaggcaagggctctgaagtcagggtcacctacttgccagggccgatcttggtgccatccagggggcctctacaaggataatctgacctgcagggtcgaggagttgacggtgctgagttccctgcactctcagtagggacaggccctatgctgccacctgtacatgctatctgaaggacagcctccagggcacacagaggatggtatttacacatgcacacatggctactgatggggcaagcacttcacaacccctcatgatcacgtgcagcagacaatgtggcctctgcagagggggaacggagaccggaggctgagactggcaaggctggacctgagtgtcgtcacctaaattcagacggggaactgcccctgcacatagtgaacggctcactgagcaaaccccgagtcccgaccaccgcctcagtgtggtctagctcctcacctgcttccatcctccctggtgcggggtgggcccagtgatatcagctgcctgctgttccccagatgtgccaagtgcattcttgtgtgcttgcatctcatggaacgccatttccccagacatccctgtggctggctcctgatgcccgaggcccaagtgtctgatgctttaaggcacatcaccccactcatgcttttccatgttctttggccgcagcaaggccgctctcactgcaaagttaactctgatgcgtgtgtaacacgacatcctcctcccagtcgcccctgtagctcccctacctccaagagcccagcccttgcccacagggccatactccacgtgcagagcagcctcagcactcaccgggcacgagcgagcctgtgtggtgcgcagggatgagaaggcagaggcgcgactggggttcatgaggaagggcaggaggagggtgtgggatggtggaggggtttgagaaggcagaggcgcgactggggttcatgaggaaagggagggggaggatgtgggatggtggaggggctgcagactctgggctagggaaagctgggatgtctctaaaggttggaatgaatggcctagaatccgacccaataagccaaagccacttccaccaacgttagaaggccttggcccccagagagccaatttcacaatccagaagtccccgtgccctaaagggtctgccctgattactcctggctccttgtgtgcagggggctcaggcatggcagggctgggagtaccagcaggcactcaagcgacttaagtgttccatgacagactggtatgaaggtggccacaattcagaaagaaaaaagaagagcaccatctccttccagtgaggaagcggggccaccacccagcgtgtgctccatcttttctggctggggagaggccttcatctgctgtaaagggtcctccagcacaagctgtcttaattgaccctagttcccagggcagcctcgttctgccttgggtgctgacacgaccttcggtaggtgcataagctctgcattcgaggtccacaggggcagtgggagggaactgagactggggagggacaaaggctgctctgtcctggtgctcccacaaaggagaagggctgatcactcaaagttgcgaacaccaagctcaacaatgagccctggaaaatttctggaatggattattaaacagagagtctgtaagcacttagaaaaggccacggtgagtcccaggggccagcactgctcgaaatgtacagcatttctctttgtaacaggattattagcctgctgtgcccggggaaaacatgcaccacagcgcatctcgagtcagcaggattttgacggcttctaacaaaatcttgtagacaagatggagctatgggggttggaggagagaacatataggaaaaatcagagccaaatgaaccacagccccaaagggcacagttgaacaatggactgattccagccttgcacggagggatctggcagagtccatccagttcattcaacacctggttagaaaactggggccagcacacaggggaagggtaagctggtttcatgatcgaatcaaggctcagacaatttttaaaggccagagggtagactgcaatcaccaagatgaaatttacaaggaacaaatgtgaagcccaacatttaggttttaaaaatcaagcgtataaatacagaaggtggagggaacttgctttagacacagttcaggtgaagaaagacctggaaacttctgttaactataagctcagtaggggctaaaagcatgttaatcggcataaaaaggcaatgagatcttagggcacacagctccccgcccctcttctgcccttcatccttctttcaatcagcagggaccgtgcactctcttggagccaccacagaaaacagaggtgcatccagcaccacagaaaacagagccaccacagaaaacagagggtgactgtcatcccctccagtctctgcacactcccagctgcagcagagcaggaggagagagcacagcctgcaatgctaatttgccaggagctcacctgcctgcgtcactgggcacagacgccagtgaggccagaggccgggctgtgctggggcctgagccgggtggtggggagagagtctctcccctgcccctgtctcttccgtgcaggaggagcatgtttaaggggacgggttcaaagctggtcacatccccaccgaaaaagcccatggacaacgaaaagcccactagcttgtccagtgccacaggaggggcaagtggaggaggagaggtggcggtgctccccactccactgccagtcgtcactggctctcccttcccttcatcctcgttccctatctgtcaccatttcctgtcgtcgtttcctctgaatgtctcaccctgccctccctgcttgcaagtcccctgtctgtagcctcacccctgtcgtatcctgactacaataacagcttctgggtgtccctggcatccactctctctcccttcttgtcccttctgtgacggatgcctgaggaaccttccccaaactcttctgtcccatccctgccctgctcaaaatccaatcacagctccctaacacgcctgaatcaacttgaagtcctgtcttgagtaatccgtgggccctaactcactcatcccaactcttcactcactgccctgccccacaccctgccagggagcctcccgtggcaccgtggggacacaaaggaaccagggcaaagctccctcagccccattcaaagaggcctggcccacaggctcacggaaagttagcctctcatgccccgagagctgagtgcaagggagaggcagcgctgtctgtgcttcccatgcagaagcacccccctcccacccctgtgcaggccggccttcgcggcagaccaccatacaccacgttccaagccacactgaggcctccctccaagcctgcagcccccatttccagaccctgccagggcaacctgcatatccacctccctaccctgcccccctcttccaggagtctgccctatgtggagtaagcacgtggttttcctcttcagcaactatttcctttttactcaagcaatggccccatttcccttggggaatccatctctctcgcaggcttagtcccagagcttcaggtggggctgcccacagagctcctcagtctaagccaagtggtgtgtcatagtcccctggccccattaatggattctgggatagacatgaggaccaagccaggtgggatgagtgagtgtggcttctggaggaagtggggacacaggacagcattctttcctgctggacctgaccctgtgtcatgtcaccttgctaccacgagagcatggcctgtctgggaatgcagccagacccaaagaagcaaactgacatggaaggaaagcaaaaccaggccctgaggacatcattttagcccttactccgaaggctgctctactgattggttaatttttgcttagcttggtctggggagttctgacaggcgtgccaccaattcttaccgatttctctccactctagaccctgagaagcccacgcggttcatgctagcaattaacaatcaatctcgccctatgtgttcccattccagcctctaggacacagtggcagccacataattggtatctcttaaggtccagcacgaggtggagcacatggtggagagacagatgcagtgacctggaacccaggagtgagggagccaggactcaggcccaaggctcctgagaggcatctggccctccctgcgctgtgccagcagcttggagaacccacactcaatgaacgcagcactccactacccaggaaatgccttcctgccctctcctcatcccatccctgggcaggggacatgcaactgtctacaaggtgccaagtaccaggacaggaaaggaaagacgccaaaaatccagcgctgccctcagagaagggcaaccacgcagtccccatcttggcaaggaaacacaatttccgagggaatggttttggcctccattctaagtgctggacatggggtggccataatctggagctgatggctcttaaagacctgcatcctcttccctaggtgtccctcgggcacatttagcacaaagataagcacaaaaggtgcatccagcactttgttactattggtggcaggtttatgaatggcaaccaaaggcagtgtacgggtcaagattatcaacagggaagagatagcatttcctgaaggcttcctaagtgccaggcactgttccattcctttgcatgttttgattaatttaatatttaaaataattctaccaggaagctaccattattaccacaacttcacaaatgagaacaccgaggcttagaggggttgggttgcccaaggttacagaggaagaaaacaggggagctggatctgagccaaggcatcaactccaaggtaacccctcagtcacttcactgtgtgtcccctggttactgggacattcttgacaaactcggggcaagccggtgagtcagtgggggaggactttcaggaagaggtgggttcccagttggtgacagaagaggaggctgcaaagtgaaggagcaggggctccaggtctggcgacaaccagggaagggacagggcagggatggcttggaccacgagaggcacctgagtcaggcagtcacatacttcccactggggtctaccatgtgaggcatggtgtgggatcctgggaaggagaccaagcctcatttcagtttgcttatggccaaagacaggacctgtgtacccgacaacccctgggacctttaccaaaaaaagagcaaacaccattcactcactcatgttagataaacactgagtgaagtcactggagcccaaggactgtgcgaggtcagcactgccaatacaagaagctgcagccctccagctcgcctccctcaatggccactccgtgctccagccatgctggcttccttttaggtcctccacctccaggctgtagttcatgtgcttctttctggaatgttcttcccaacctacccactcaaccctcagactttaccataaatgtcatttcctcacgtctgccttccctgacctgagaccaagccaggcttcccatgacgagcctcacagtaccccatctcccctgaacagatgcagtaataacctacataacccggggccatgatctatggctttgaatcctggctctgtcactaggccaggtctctcagcccttctgtgcctcagtttcctcatctataaaatgagatgacggcagtgcctgctcatgaagtgtgagttaatgcactcaaatcaatggttgtgcacggtttatatgaatattagtgattacaaaatattatcaatagaccttgtcacaactgttattgaagaactaatcatctattgcttatttaggtctttctctcctgccagaatgtgcgctccaggtggagaggtatgttgccttatccgtggctggatatatagagattcccacactgccttgcacacgagcactgctgggtaaatatttgttggctgcaggaaaacgtgaaggaataggccctccaatgggaggaaaagcatgagttgtgagagcagagccaccacaggaaaccaggaggctaagtggggtggaagggagtgagctcttggactcccaggagtaaaagcttccaagttgggctctcacttcagcccctcccacacagggaagccagatgggttccccaggaccgggattccccaagggggctgctcccagagggtgtgttgctgggattgcccaggacagggatggccctctcatcaggtgggggtgagtggcagcacccacctgctgaagatgtctccagagaccttctgcaggtactgcagggcatccgccatctgctggacggcctcctctcgccgcaggtctggctggatgaagggcacggcataggtctgacctgccagggagtgctgcatcctcacaggagtcatggtgcctgtgggtcggagccggagcgtcagagccacccacgaccaccggcacgcccccaccacagggcagcgtggtgttgagacaacacagccctcatcccaactatgcacatagcttcagcctgcacagataggggagtaggggacagagcatttgctgagaggccaggagcgcatagatgggactctgctgatgcctgctgagtgaatgagggaaagggcagggcccgggactggggaatctgtagggtcaatggaggagttcagagaaggtgcaacatttctgaccccctacaaggtgcttgctacctgccaggcaccctttccataccttgtctcagttcagctccccaccttggataaacaagaaaccttggttgcagaggaaaaaagaggctggaaacaaaggggtagaaatggggtagcaggggagattgcctgatcaactgccaaatggtacacagttctggaaaagcacaaaaaatgtgcacacacgggttcttcccactttaacccctgaggaatctgaggcctgctcctgaaacagactgggcagtggctagtgactctaggtataggagtatccagccctgctcacccaggctagagcttagggggacaagaggaaagaggtgcctgtgggggtggaggacaggaaggaaaaacactcctggaattgcaaagtgagggcagagtctatttatattgggtttaattaactcctctccctggtgccactaaagcagcaatcacactgcagacagcactgatttgattggcaagagatgcaccaggcagaatattaagggaccaggcccctataaataggcctaatcacagcccctcactggaaaatggtaaggaagacattaatcaggcctggcactgtgccctagacctgctcccctaggcactacagtggggcccttggttgcaacacaagtaggtagggatggatgagtgtggcatgaagggcctaggagatttcacttgggtttaaaatgctgtgaccttgagtaagttgccgtctctgaatctgatcctttcgatttcccattctccaaactgagaactagcactgctgagacgtggttatttccaataataatttgtatattttacataacgcaccacaccaacatcttcacccagttggagcctactcctttgctcccgctgctggcttccccagccctcccttctgccctcctcaggccagcacttttcagtgagttcctcctttgcatacaggctttccagatctgtacttgccttgaatactcatcagagcccaggagttactcctcacctcccacttatttttcctcccatcaaataactaaagcatggccagctgatgcccagccaactgagaaacccaaccctctgagaccagcacacccctttcaagcatgttcctccctccccttctttgtatttatactgatgcaagtttgctggctgtcctaacttatttctgtgcctcagttctcccatatgtaagatcacaaagggggtaaagatgcaagatatttcctgtgcacatcttcagatgaatttcttgttagtgtgtgtgtgtttgctcacacatatgcgtgaaagaagagtacatacacagatctcctcaaaaaggaggcagcaagcccgttcaagaatgggactgaatacacctgatgagtggtttactttctgtctgcaaacatctactgatcatctgttaggtgcaggccatgatcacaacaaagacgaataagacactacactagccagggagagtctcaaaaacaactaaactcaaattaaattcattctactccagtcatgggtacaaagctaaggagtgacaaatccctcttggagttagggg[134 bp omitted]catggtgaaactccatctctactaaaaatacaaaattagccaggcgtggtggtgcatgcctgtaatccccgctactcgggaggctgaggaaggagaatcacttgaaccgggaaggtggaggttgcagtgtgccaagatcgcgccatggcactccagcctaggcaacgagggtgaaccaggtccaggaagaaggtgcaaagacagcattccaggtaaaagaaacagcttgaacaaaaagtgtgtaggggaaccgcaagcggtcttgagtgctgagggtacaatcatccttggggaagtactagaagaaagaatgataaacagaggccagtttgttaaaaacactcaaaattaaagctaggagtttggacttgtggcaggaatgaaatccttagacctgtgctgtccaatatggtagccaccaggcacatgcagccactgagcacttgaaatgtggatagtctgaattgagatgtgccataagtgtaaaatatgcaccaaatttcaaaggctagaaaaaaagaatgtaaaatatcttattattttatattgattacgtgctaaaataaccatatttgggatatactggattttaaaaatatatcactaatttcatctgtttctttttacttttagaaatcacatatgtgacttaaatatttcttttctttttctttcctctcactcagcgtcctgtgattccaaagaaatgagtctctgctgtttttgggcagcagatatcctagaatggactctgacctaagcatcaaaattaatcatcataacgttatcattttatggccccttcttcctatatctggtagcttttaaatgatgaccatgtagataatctttattgtccctctttcagcagacggtattttcttatgctacagtatgactgctaataatacctacacatgttagaaccattctgactcctcaagaatctcatttaactcttattatcagtgaatttatcatcatcccctattttacataaggaaatggggttagaaagaccaaataacattttttcaacatcaaaacactagcttgagatcaagcccagacttggatctgtcgtctgaattccaagctttttgttatttattgatatgttttgttgttttcatgcaataatgcaaatcttagcccaaacattttgttagtagtaccaactgtaagtcaccttatcttcatactttgtctttatgtaaacctaaattagatctgtttttgatactgagggaaaaacaagggaatctaacactaaccagcccgtagtgtgtggtcaacactttcgttactttagtatacatcaccccaattgtttgtcttcaccacacactttggagttaggtagtagtatctatttttacaaataagaaaacccaggcacaaaggggttgattagcaattatcttttgaaaagcctgtagttgctcatctgaagaagtgacggaccacctcttatttagtggacagacagtaactagttgagaagacaggggattttgttggcggaaaaaaaaatttatcaaaagtcgtcttctatcagggagttttatgagaaaccctagctcctcagttccacagtgggtaactgtaattcattctaggtctgcgatatttcctgcctatccattttgttaactcttcaatgcattccacaaatacctaagtattctttaataatggtgggttttttttttttttgcatctatgaagttttttcaaattctttttaagtgacaaaacttgtacatgtgtatcgctcaatatttctagtcgacagcactgctttcgagaatgtaaaccgtgcactcccaggaaaatgcagacacagcacgcctctttgggaccgcggtttatactttcgaagtgctcggagcccttcctccagaccgttctcccacaccccgctccagggtctctcccggagttacaagcctcgctgtaggccccgggaacccaacgcggtgtcagagaagtggggtcccctacgagggaccaggagctccgggcgggcagcagctgcggaagagccgcgcgaggcttcccagaacccggcaggggcgggaagacgcaggagtggggaggcggaaccgggaccccgcagagcccgggtccctgcgccccacaagccttggcttccctgctagggccgggcaaggccgggtgcagggcgcggctccagggaggaagctccggggcgagcccaagacgcctcccgggcggtcggggcccagcggcggcgttcgcagtggagccgggcaccgggcagcggccgcggaacaccagcttggcgcaggcttctcggtcaggaacggtcccgggcctcccgcccgcctccctccagcccctccgggtcccctacttcgccccgccaggcccccacgaccctacttcccgcggccccggacgcctcctacctgcgagccgccctcccggaagctcccgccgccgcttccgctctgccggagccgctgggtcctagccccgccgcccccagtccgcccgcgcctccgggtcctaacgccgccgctcgccctccgctgcgccctccccgagcgcggctccaggaccccgtcgacccggagcgctgtcctgtcgggccgagtcgcgggcctgggcacggaactcacgctcactccgagctcccgacgtgcacacggctcccatgcgttgtcttccgagcgtcaggccgcccctacccgtgctttctgctctgcagaccctcttcctagacctccgtcctttgtcccatcgctgccttcccctcaagctcagggccaagctgtccgccaacctcggctcctccgggcagccctcgcccggggtgcgccccggggcaggacccccagcccacgcccagggcccgcccctgccctccagccctacgccttgacccgctttcctgcgtctctcagcctacctgaccttgtctttacctctgtgggcagctcccttgtgatctgcttagttcccacccccctttaagaattcaatagagaagccagacgcaaaactacagatatcgtatgagtccagttttgtgaagtgcctagaatagtcaaaattcacagagacagaagcagtggtcgccaggaatggggaagcaaggcggagttgggcagctcgtgttcaatgggtagagtttcaggctggggtgatggaagggtgctggaaatgagtggtagtgatggcggcacaacagtgtgaatctacttaatcccactgaactgtatgctgaaaaatggtttagacggtgaattttaggttatgtatgttttaccacaatttttaaaaagctagtgaaaagctggtaaaaagaaagaaaagaggcttttttaaaaagttaaatatataaaaagagcatcatcagtccaaagtccagcagttgtccctcctggaatccgttggcttgcctccggcatttttggcccttgccttttagggttgccagattaaaagacaggatgcccagctagtttgaattttagataaacaacgaataatttcgtagcataaatatgtcccaagcttagtttgggacatacttatgctaaaaaacattattggttgtttatctgagattcagaattaagcattttatattttatttgctgcctctggccaccctactctcttcctaacactctctccctctcccagttttgtccgccttccctgcctcctcttctgggggagttagatcgagttgtaacaagaacatgccactgtctcgctggctgcagcgtgtggtccccttaccagaggtaaagaagagatggatctccactcatgttgtagacagaatgtttatgtcctctccaaatgcttatgttgaaaccctaacccctaatgtgatggtatgtggagatgggcctttggtaggtaattacggttagatgaggtcatggggtggggccctcattatagatctggtaagaaaagagagcattgtctctgtgtctccctctctctctctctctctctctctctcatttctctctatctcatttctctctctctctctatctcatttttctctctctctctttctctcctctgtcttttcccaccaagtgaggatgcgaagagaaggtggctgtctgcaaaccaggaagagagccctcaccgggaacccgtccagctgccaccttgaacttggacttccaagcctccagaactgtgagggataaatgtatgattttaaagtcgcccagtgtgtggtattttgttttgactaatacaacctgaaaacatttttccctcactccacctgagcaatatctgagtggcttaaggtactcaggacacaacaaaggagaaatgtcccatgcacaaggtgcacccatgcctgggtaaagcagcctggcacagagggaagcacacaggctcagggctctgctattcattctttgtgtgaccctgggcaagccatgaatggagcttcagtcaccccatttgtaatgggatttaattgtgcttgccctgcctccttttgagggctgtagagaaaagatgtcaaagtattttgtaatctggctgggcgtggtggctcatgcctgtaatcctagcactttggtaggctgacgcgagaggactgcttgagcccaagagtttgagatcagcctgggcaatattgtgagattccatctctacaaaaataaaataaaatagccagtcatggtgtcacacacctgtagtcccagctacatgggaggctgaggcgggaggatcacttgagcttgggagatcgaggctgcagtgagctatgattgtaccactgcactccaggctgggcgacagagagagaccctgtctcagaaaaaaaaaaaaaagtactttgtaatctgtaaggtttatttcaacacacacaaaaaaagtgtatatgctccacgatgcctgtgaatatacacacacaccacatcatataccaagcctggctgtgtcttctcacaaatgcactgctaggcaccacccccagttctagaatcacaccagccagttcaccctccagatggttcaccctcaacttcataaaagttccctacctaatctactgacaggctcatccccgacctaattttaaagatttcctaggagctgcagtgggaatcctggacctcagcctggacaaagaacagctgcaggtcattctcatgtgtggacacagaagctctgcctgcctttgctggccagctgggctgagcgggcctgggaattaaggctgcagggttggtcccaggcagtcttgctgaagcttgccacatcccccagcctcctggatttgccaggatccaagagcatggactttaggaattcctggtggaggagtgaagaaaatgtgacagggtgtcctaagccccgatctacaggaagaaaactggaaataagactgaggacttagtttaagatgttcctactcagcctctagcttttgtgctacagttctgggaacagactcctctctcctgaaaaccacttccctccgcagcattagatttcaccaagatgtcttgcttgtgggaaagacttccaaggatgcctggagagaggaggatggaaatgtcctgctctctaaacagatagacagatgcagccagacagaaaatagtttatcttgctgaggtttctaatgtatttgaaagaggcctgggtctagaagtctacccagagggctctgtgttgtgcacgcaaagataagaaccttccctgtgggagttccagagccagttttcataaacacccatcggtgactgtgttcagagtgagttcacaccatcctgacctgccctgagttagaccttacatggtcttcctcctctaggaagcctctgcagcccaggaacctccccttatcggaaatgaacagcatttgaagcttcaccagacagaccagacagcttagccctcgtgttgtgccatgtgggttgttctctgagaggcaggagagcatagtggttactaggaagggaaggactttgggactagactgcctcggctggagtcctctttctgcttcatagccacgtgatcctaggcatgttacctgtgcctcagttttcactctgtcaatatgtaataactgaatctgtctttgtggtgaggattcagtgagttaacatatttgaagtgcttaaaaatgaggcttgtgtccatagattaatgagtgaatacacaaatggtgatatggacatacagtggagtattagtcataaaaaggaaggcagagctgatccatggcaccatgtgacagaacctcaaaagcattaggttaagtggaagaagccagacacaggtcacctattgtgtaattccatttataggaaatatacagaatatgtaaatccgtggagaaagaaagccgatttccaggggctaaggggaggggagaatgggaagtggctgcttcatgggtacaaggtttcattttgagctgatgaaaatgttttggaactacatagagatagtgttggcacaacatggtgaatgtactgaatgccactgattgttcactttaaaatggtcaaacttatatgaatttcacctccattaaaaaaaaaaaaaaaggaccagatgtggttgctcacacccataatcccaacactttggaaaaaggtgaaagtttttttttctttttttttttatatacttaagttctagggtacatgtgcataatgtgcaggttggatacatagatatgcgtgtgccatgttggtttgctgcacccatcaacttgtcatttacattaggtatttcttctaatgctatccctcccccagccccccacccactgacaggccccagtgtatgatgttctctgccccatgtccaagcgttctcattgttcaattcccacctgtgagtgagaacatgcagtgtttggttttctgtctttgtgatagtttgctcagaatgatggtttccagcttcatccatgtccctgcaaaggacatgaactcatcctttttaatggctgcatagtatcccatggtatatatgtgccacattctcttaatccagtctgtcattgatggacatttgggttggttcaaagtctttgctattgtgaatactgccacaataaacatacatgtgcatgtgtctttatagtagcacgatttataatcctttgggtatataccctaagacctgggacgcatttaaagcagtgtgtaaagagacatttatagcactaaatgcccacaagagacctctgcctgagaacgtgggtttcagcctaagagttgtaatatgtgtgcccattcacaggtgctgcatcagagtcccaggtgggaagaaggcaagcatacacaaaaatggtaaaaggcagaaaggagcccagtctcgttctttttaagaagttttcctaagaatctccacccagcgacttgctctcacatcttcttggccagcactggaccacacaactccttctagatacagaggagtcctaggattctatgagaaagaaggggagggtgggcaaagggcagccagctgtgcagcatctgctggagacacctaacccttggtggaggggttgtggtgctgggagaaggctttctggacggtgtgacagcagagataaacttaaaggccaagtaggagttaccctggtgaagcagggcagggttacaagcattccagcaacatgaagcagcaggagtgttttaattaaaagaaggcagttgctgtaaccaactataaacaaataaaggcttaaacacaatggaagtttatttctcactaagggaacatccaaatccatgatactttaagtcagggacccaggttcctcccatctatggttctgccatcactaatctgggtcttccacaattgccgtgctccttggaggtgggaagagcaggcggaggacacgtgggaggttttagggacaagcctggaggcagcatgcgtcactcccatgcagagtccattggccaatgctggctccgatggccacatctcactgcaggggcagctgggaaatacagtctggctgtctacccaggaggaagagcagccagtttctgctgctgatgatcaggaggtggagaaaatgttcagtcaggcagggagtgggaatagacaagaccacaagcagcttggtgcctctgaaagggagaggggtggaggggagactagagaggtgggtaggaatactggattccactgaccacgtgctggatgtcacgcttagccctcctgctctgtgccgggttaggcacctggtgttttacgtacataatctcaattctgtgagggcatccgacctgtgggaaaagagctgtttgtttcaaatgccagtcctgcttcctaacaagtgtttagagcttaatcgtgttcaaaatacatatacaatgtttaatacttacaagaatttggtggggaaaatattaccatctttcccttttgtgattggagaaaaatgaggctttgaagggtttaagaacttgcccaaggtcggccaggtgcagtggctcatgtctataatcccaacactttgggaggctgaggtgggaggatcgcttgaggccaggagttcaagaccagcctgagcaacatagtgagactttgtctctataaaaaataaataaataaataaaaacaacttgtccaaggtcagacaggcagcctcttagtaagcacacatatcctctatattatactacctctcatggaggatctcctgtgttctacaaatagtctggacttgagccagaatgtgttataatcctgggatcacggccagtgggcttagaagaagccatctctttctcatgccaagatgaggctcccccagatttgctcagacttacctatagtcagcagcatcgggggtcaggaaagacttcacgaagccataaatgcatccttctcggggcagcacctggctctcccaggtgagagaggactccattttcacaggcaggcgtgggagcttcagcacccatctctgggcccagaatgacccactggagaccttacagctctcctgtcacccccaattcctgccccctctgcagccttggaggagaatggagctgaagggcctgccctctgtagggtgagaaagggaggctaaagcctggtgcccactgccctggctgctccgcattgcaggagctgcgcccttcctttcctggcacagggtccacagccccgaaaccccgttgtgtgggagctgggcacagggcagcaggactaatccttggaacagctcagggaggattatcccagccactgtcagcagcggtgcagctggctcattcccatatagggggaggccagagccaggggcctgccacaagttggaaggctggggaaggggaggccagcagaggtgtcctggctgtgggtggctctgagggggctctcaggggtggggctaaatctcaggggcaggattatgtaaatcaaaccaattctagccacagatttaaagtttggaaaaaaaaaaaaacccagcctggcggaaagaatttaaattataaaaacttagaagtatggaatgtgaaatcatcctgtaggtgcttatttaacaacgaaatcatcccgacacaatgagccatatgtgaaaagtcatccttccccaacacatcccccaacaggcactcctcaagcctctcccacccaagtgctggcatcctccctgtcctgcttcacctgagacaccccttgtctcattagacatgcaactacgggaggggtgacaggaagacaagacactatttcctcaggcccagtttggtgtggggagaaagcctcctgatcctgaaagcaagaatttgaccagagcagaagtaatcagtatgcagattgattctgtggtatgttaatgtttatgcatagattatgaggaccaggtgaaaagtgggccaggggagccagatgtgtgtgtgagtcatgggtggctgagatgaggacaggagggaaactggtttggagggtgctggcgatggggtgggggtgccaggaggaagggaggctagttgtttgaatgtctgcatgaaaaagcggacgacagcggggtctgggtgaattcgggcaaccatttggaccgtggagaaaactgcctgcgtgcggctgaggacctgcactattaatttgttttttagctaaggcaaagataaatataaaaactgatactccacccagttaccagaaaacatttaggtatgtgtgagacaacttgggtatgtgaacctaccttttcaatgtaaattcagtgaaatctaagtgcagatcccatatttccaataaaaaggtaacatccaaactcagatgtcctatgagtataaaatacacaaagatcttctggacttagtatgaaaagggattttttttttgtcaggtacctcactagttatttttaaaataggattgcatgttgaaatgataatcttttggatatattgggttaaataaatttattattaaagttaatttcacttaaaaatgtttaatgtagctactagaaattttaaaattaagcatgttgctcaccttatgtttctattggacggctctctctagatacaaaggctgccaagagggacctcactctagcttcagggagaagagaggaattagcaaggccaagcagaggctcctgagggcagggccaagggcggcttggtggggtggggatgggatgcacagagataactccaacccttaagaaggtgtttcctagagcaggctgtgacctgtcagtttatatactgaggcttaggagcctcttggatgcccccagatctgcacccctgaattgccctgtgcccctgccgtctttgttcctgtgctggcatagtggtctcacctccggcagtatcaccaccactgggcacaagcttctccagcacagcaactgtgtcttatttctccttgtactcccagtgttcacaccatgctgcactcacagaagactcttcgttgatattttgtggacagagagaatgcctgtgagagtgggctgaagtgtgcgttgggctccagagaccttaaggaggggagaccaggtcctgagtaaagttgaaggggaggggctgagtcctgctagccaggagtctcatcccctggggaagttccagggacccctcagaagtgcaaggggacggtgttagtgttagtccagtaacacagcccagagcctgccttccacgtgggtttgacaggagcctcctaactgctcttctgcttccatttttgccccttcagtctattctcaacagggaagccagaggcatccttaaccatgtcagatcatgtggctcctcagctcaaagcctcatctcagaggaaagctctggtcccttagaaatggcccaggtggtgacagacagactctaaggtgagcagactgttgctagatatctgggctcggaggactcgccactgctcaaaggcagtgaggattttcgcactagaagctggaggacagggatccttgttaggtaggagcagaaagcttagaaaagtggtctcctgcagttacgtggcaaacacatcatgtaagtgataaattgggtatgcagttgaggagatttccaagtaaaatgttgaggatgctgcctggtttcttcttactgcttataatatagtgtgagagaagagagataaattgagaaagagactggtttttaaactgttaaaattgaatcaggacttgatgattttgaaaattgtcagtctccccacatggaaaaagatgctgaaattaacaaatggcttctgagcatgtggcatagggtgtaactgtacagtcttttgtgattatgcataaagatcaaaggatgggagtagcaatgagtcacacagaggtctgttgcaagagattacaagggtgtaccatgcagaacctctccaccaaaccttagggcccttgggaagcttcagtgagttaccctgggggccatcttggcaggagctgaaggtagaaaggtagagtttatctctaaaagattcatgggtatggctcttgacaaatcgactatgagccccactgaaacccacagaggacaggcaaagggtttgggaaagctgtttcacccacagtgctggcagattggtctgtaggggacagagtgcaaaatgaaagaagactgtcagagaccccaaactctgctgtcaagaagaaggctgataaaactacttggctgcaaacacgtggatctttcgtgagaaaagaaggatgacccagaggcagaagcccagaaggcagagccaagagacatggaatcttcccacatcttaaaacctgtttagggaacaccagcgtctgtccagctggatttcagaaccaccattccttcatccctcccctgctgcctctttctgaacagcaatgtctcaagctttacccaccattgtgtgttgcatatgtagggggcagatagcttgtatctttagttttccagatcagaggaacatccaaagaaatctgttctacacctaaacccgatttagatgagattcgggactgtgagcatgaagggatctcaagaggggtgaatgtgttttgcatgcacaagggacaggagtcttggggacagaggacaggctgtggtggcagatactaaggtgacccccacaacccccacctctgccattcacacccttgaataatccccttctctggttgtaagcagaacctgtggcttgcttatgaaggaggcggtatatatgtgattcatgtactgatcatattgtataagatcactggctggatgcagtggctcgtgcctgtaatcccaacactttgggaggctgaggcgggtggatcacctgaggtcaggagttcgagaccaggctggccaacatggcaaaaccccgcctctactaaaaatacaaaaattagccaggcatagtggtgcacgcctgtaatcacagctactcaagaggctgaagcaggagaattgcttgaactcaggaggtggaggtggcagtgagccaagatcgtgccactgcactccagcctcagtgacagagcgagactctgtctcaaaaaataaataaataaaatgttaagatcataacctgtctttctggggactctctcttgacgcctttgaagaagcaggctgccatgttgcaagctgcctcatggaggggatcagctgcgaggagctaagagccccctccagtcgatgctcaccaggaagctgaggtcttgtgtccagcaccctgcatggaactgaatgctgccatgtgagcttggaagcagagccatccacacagctgagccctagatgagaacccagtgctggctgacaccctgatggcaccttacagaggaccagttaggctgtgccaactcctgacctgcagaagctggggaacattgggtcgtatttgcagctgctggatttgtgggaatttgtcacacagcaattgggagtcacacagcctgtgacgccccaacaatccacacctcctgcatctccctgccttcacttcctagcacactgccctgactccctctgccgcagccacgctggccctctgctgttcttcgaagccaccagggctgcattggctcccagcctttgctctcactgctttctcctcctagagagcccttcctgcatgtatatgtttgactcactcccttgcctccttcagacttgtacttaaaaatctcagtaagcatttccctggctacccttttaaaaattgcaacccacttccatccccatccccaacatgccatatttcctttcttcttcttccttcttcctttttttttttttttttttttgacacaggttctctgtcacccagcctggagtgcagtgacatgatctcggctcactgcaacctctgcctccccaggcaagaaaaggggaggatgccaataaaggatgcattgatttgtatttactacagtggacatcaagggcacattcttgctgtggccatcaagagactgtataaattctatgacttgtagttgtcccacttaagaaacaaagaagctgtgcatttctttactggtctagagctgctctagggcattttctctacagcaattctaggtttccccaccttgtgagtttagctttttctatattcaaagaaaagtcctcagccagagattctcaggagcttatagaacaatccaaactcttgggaatattaagtggagaggggtacgtgcaagacaccaacagcactagaaacagtccacatctttccatgcgtggaggagtttatgctctatgtgagttcactccatcattaattcttcaaacacaagagtgttaaaggaacaagagttaatgggtcctgtcattacacttgttcccaggatgacattcttcatcttcctcttctacaacctgttctatattcccctcatgtttatccagtgcttctgctagtctagttcacttccaaagacccatgattaccatggccctgtcaggctgtaattgctgcaatttccaatttacaattgtcatcatctatggttgataaaggtatagcaatatttctatttcctcatgataatgaaggtcaattacaactgccagtataataacttatttctttgtctgccaacctacatacacaaggaagccaaaatgacagggagctactaaaactttattcttattggaatgcttactatgtacccagaagaagcattctccctactccagcagagcttaatgctgtaggtccaggaagctcaaattctccaagggagttttagtgagaggagccactctcaccctctgcccttggtttacaaacctgtatattctaggacccaatatcttacaatgtccattggttcaaagtataacatgttaaagcacagagccccaactctgaaaagtaccatccctaaattggcatttagttgcacctttatatccacctttaaaagaaatatcttttaatgttctatcagactgatagattctgtttaatatagtatattatagcaccagtggatcatttggttgtatgcatattattgtaccttctctgctacaaaatatattcctttgtcctaaggtgtgttacaaagaacattaggcattctatgcatctttggatagtttaatggccaaggcattgatggcaggagagtcaaagccacaggtggaaaacacatttatcccagtaagaacaaattgctattcttccactgtagagagggtaaacaatgtgccattacgttgccaattgaatgcctcaatcatgtcaagggctgaacatctatgactgtttctgaaaggtcaaacattcaacagaggctgtagctagaactgccttaatgataagagatcatgctgaattacccatgcaaaaccttaatacttgacacttatcactactttattcaagagcctattgtgcaagcataagtggctgagtcaggttctcaactctgctcattaatactatgcttggagtatacagtaagataagaaacataaataagaagtgtacatttgtttcttcctgttttcttctggctattggatcaattacatcccatcttaagctgacccctgtgtaattaatcaatatccgttttaagcagcaatccatagttgtgcagaaattagaaaactgacccacacagaaaaactaattgtgagaaccaatattatactaaattcatttgacaattctcagcaaagtgctgggttgatctctatttacgcttttcttaaacacacaaaatacaaaagttaacccatatggaatgcaatggaggaaatcaatgacatatcagatctagaaactaatcaattagcaatcaggaaggagttgtggtaggaagtctgtgctgttgaatgtacactaatcaatgattccttaaattattcacaataaaaaaaaagattagaatagtttttttaaaaaaaaagcccagaaactaatctaagttttgtctggtaataaaggtatattttcaaaagagaggtaaatagatccacatactgtggagggaataaaatactttttgaaaaacaaacaacaagttggatttttagacacatagaaattgaatatgtacatttataaatatttttggattgaactatttcaaaattataccataaaataacttgtaaaaatgtaggcaaaatgtatataattatggcatgaggtatgcaactttaggcaaggaagcaaaagcagaaaccatgaaaaaagtctaaattttaccatattgaatttaaattttcaaaaacaaaaataaagacaaagtgggaaaaatatgtatgcttcatgtgtgacaagccactgatacctattaaatatgaagaatattataaatcatatcaataaccacaacattcaagctgtcagtttgaatagacaatgtaaatgacaaaactacatactcaacaagataacagcaaaccagcttcgacagcacgttaaaggggtcatacaacataatcgagtagaatttatctctgagatgcaagaatggttcaaaatatggaaaccaataaatgtgatatgccacactaacagaataaaaaataaaaatcatattatcatctcaatagatgcagaaaaagcattaacaaaagtaaacattctttcataataagacatcagataaaacaaattaggaatagaaggaatgtaccgcaacacaataaaggccatatataacaagcccacagctaacatcataatagtaaaatcatcacactggtaaaaaaaatgaaagcttttcctctaaggtcagaaataatataaaggttcccactcttgctatttctattccatatcgtactaaaagtcctagccaggacaattagacaaaataaaaataaaaacacccaaattggaaagatagaagcaaacttttctgtttacagataacataatcttatatgtagaaaccccttaaaacttcagcaaaaaaaaaaaaaaaactacagagctagtaaattcagtgaagttgcagaatacaaaatcaacatacaaaaatcagtagtgtctctatacactaataaggacttaacagagaaagaagttaagaaaacaataccactaacaatagaatccaaaaaataaaatacttaggaataaattttaccaaacatctgtacactaaaaactataaaacattgaaaaaagaagttgaataagacacatataaatagaaagctatctcatgttaatagattagaaaaagtaatattgttaagatgtcctcactacttaaagcaatttatagatctaatgcatttattgcaatctcttcaaaatcccaaaggtatttttgacagaaataaaaaaaaaattctaaaatatgcatgaaaccacaaaagactgtgaatagctaaagcaatcttgagcaagatgaacaacactggaagcatcacactaccttatttcaaaatctactacaaagctatagtgatcaaagcaacatgatactgtcataaaaacacacagataaacctatggaatggaataaagagcacagaaataagtccacacatttacattcaattgattttcaacaacaatgtcaagaagacaatggggaaaagacaatctcttcaataaatgatgctggaaaaactatatatccacatgcagaagaatgcagttgaatcctgatttcataccatatgcaaaattcaactggaaatggattaaatacaaatttaaaacatgaaatggtataactattagaacaaaacatagaaaatattcttcctgacattggtttgggccatcatttttctgatatgactctaaaagcacaggcaaaaaaagaaaaaatagacaaatgagactatgccaaattaaaaaatttctaacaacaaaagaaacgatcaatagagtgaaaaagataacctcttgaatgggagaaatatttgcaaactactcatccaaccggggattgatatccagaatatacaagtaacacaaatatgtcaaaagtaaaataaataaataaataaataaataaataaattaaataaattatttaaaaatcggcagaggacaggaatagacatttctcaggagacaacatacaaagggccacagatacatcaaaaaatgctcaacatcactatttgtcagggaagtactaattaaaaccaaaatgagatgtcccctcaaacctgttagaatggctattatcaaaaagatgaaagatagcaactatcagagaggatgatagaaaagggaacccttgcatcatgtacaaattaaaaatagaactatcacatgatccaagaatcctacttctgggtatatagccaaaggaattgaaatcaatatgtcaaagggatatctgcactcctatgttattgcagcatgttcacaatggccaagatatagaatcaacctaactgttcatagacagatgaatggataaatgaaatgtgatatggaaaattattcagccttaaaaacagtaggaaattctgtcatttgagacaacgtggatgaacctagaggacattaagctaagtgaaataagctagacacagaaagacaaatattgcatgatctcacttagaatctaaaaaatctgaactcatagaagcagagaatagtatgatggttactagggttatctggcagggagaggatgaggaaatgggacattgttaataaaaggaaaaaaattcaattagtaggattacattcaggggacccaatatacgacatgttgactgtaattaataatgtattgtatgcttgaaaattgctaatacagtatattgtaaatgttaatatgaggtaatatatgtgttaattaacttgatttattcattcaacaacatacacatatattaaaacatcacactgtattccacaaatatatataatttttgtcaattaaaaaataatttttaaaaatgagaaacaaaaaagctgacattttcagattaaaaaaattatacagaagaattaattcattaaagtaaaaacaaatgtgggaaaatggtttttaaatataatttaaaccaaatttaaaataagcatataaagactatggacaaaacaagaaatccaaataaaaaataaacatatgaagaatattcaaactcactttttatcaaagaaatgtaaattttaaaatatagcattgctattgtgttttcataaataataatatatcatggatgagcctgtgaggaaacagacactcatactctgcaaagcaatgactaagataattatgtcagatcatgaattacgttaattagcttgatggtggtcactgtttcacgataaatatacatatgtatcaaaacatcacattacacaccataaagatatataacttgttatcaaaaagaaatatagcagttaaaatttaaaatttttaaaaaacgtctttttgaggttcgtacctcacttaagtcacactgttcaaaatattcatgcactcatttctctcattcatgtgttaatgtacagggtacgggccactataaattccttcagcaactggaaaggaaactttatgtactgagtgctcagagttgtattaacttttttttttttttgagcagcagcaagatttattgtgaagagtgaaagaacaaagcttccacagtgtggaaggggacccgagcggtttgcccagttgtattaacttctaattcaacactttaagattcttagcattattgcagacaacatcagcttcacaagtgtgtgtcctgtgcagttgaacaagatcccacacttaaaaggatcctacactttttttaatgctctgctgtttctgccttgaaattcttaacaatttttttaaccgaagtcctcacaaattcagtttacattagccctgcaatcatgtagacatcctgattccagacaatgtgtctggaggcagggtttacaggacttcaagaaccttaccttctcaactttcatctgcatctttactcccaactatatatgaagatgatgaagatagatatggatggtgcttctaccataccctcttcctctgccaaacttccttgatctaggataaggtcagtaaacttcttccgtaaaaggccaaaagtaaatattataggctctacaggccctagagtgtctgtcataactactcaactcttattgtagcataaaaactgtcaacagacaatacagaaacaaatgagtgtgactgggttccagtgaaactttatttacaaaagatttgtcccatgagtcaaatttaccacctccagatctagagaaacacttttgagcccttttattttgctcaacagttaagcatggctccatgtcccttatatttagtcagaactcggtatgttttaaggaaagaatggttacacgaagacatacattcattcatttatacaacacattttcagtgttgaatgataaattttggaatagttaacagatgataaaagtgttggtttcagtcatccctatccaatgaagtaaaaaaaaaagtgttgaatgggaagaaatcaagaatagttatacgaatatcaccattgcattaaagctctcttccttgtttctaaaagaatatcttgacacacattaagctcactgacccccacaccatgaatgagggcatcttcaacaatggtggatgacgtcttagtttccctcaactcagttaatctaagtaagctcatggtatcactttcctgtcctagagggaacatatttcctgcatttttctttttttccttactttccatcaccaagtaactcttctgatattttttctcttgagaaaattaatatgactcatagatctggttcccaagagaaaccaatggaggcctggttacaaggatctaagaagcaccagtgggtctctaacatctagtggtactaattaactctgttaatcattgggaagaaaatgtatacatacttttgtcttggagctgattctactagaaagcagaaatcaaaatgatcagtttcccagtgtcactactgcacaccctggaacagaacaggtaggtcagaaaaacgctcccaaagtttagcaatgtcaaggcaatctctctcttcttacatttcccttcaaccttccatctcctccacttttctgttttcctcctatctccaattatttcaatcctcagagcattattcttacaatcttaatcactaaattatattacacccgttaaaggagagatttctaaatgcattgacatttgtactgtctctctttggagaattagtattataaggatctgttatctcttgtcaccttccttatgtcatatgatatgtcacatttcccactgcggagaccaaacatgttcacgtcgtgtgcgttccattttcctaatggaaagtggggggaagtgattttctgtcctcatatagagaatgctggggccattccctctgtatgccatatttgataaagcatttgataatcttagtcaatgcctgggccaagaattaaaggggtaattatcagaatgaaaatggtttaatgaaactgtgtctatcagttctgaaaagggcctctatcacaatgaactaaggtagttatgaatagagctaaaacttaggcaacaccatcctggacataggaacgggcaaagatttcatgacaaagacacggaaaccaatcacaacaaaagcaaaaattgagaagtggaatctaataaaacaatagcttctgcacagcaaaagaagctaccaacaaagtaaacagacaacctacagaatgggagaaaatatttgccaactgtaagtctgacaaaaatctaatatctggcagctataaggaacttaaatttacaagacaaaaacaaccccattaaaaagtgggcaaagaacatgaatagacactctcaaaagaagatatacatatggttaacaagcatatgaaaaaaaagctcaatatactgagcattagagaaatgcaaatcaaaaccatattgagatatcatctcataccaggcagaatggctattattaaaaagtcaaaaataacagatatcggtgaggttacagagaaaagggaacacttatacactgttggtgggactgtaaattatttcaaccattgtggaaagcagtatgggatggcgattcctcaaaaagccaaaaacagaactatcattcaacccagcaattccattactgggtatatacccagaagaatataaatcgttctaccataaagacgcatgcatgagaatgttcattgcagcactactcacaatagcagagacatggaatcaacttaaatgcccatcagtaacagactggataaagaaagtgtggtacagatacaccgtggattactatgcagccataaaaaagaacaagatcatgtctttgacaggaacatggatggagctggaggctactatccttagcaaactaaggcaggaacagaaatccaaataccacatgttctcacttatgagtgtgagataaatgatgagaacttacaaacacaaagaaggaaacaacaggcattggggtctacttgaggacgatgggaagagggagaggagcagaaaagataactactgactactgggcgctacctgggggatgaaataatctgtacaacgaacccccaggacatgagtttacctatgtaacaaaccttcacatgtacccccgaaactaaaataaaagtcaaaaaaaaaaaagaaaaaaagaaaaatccatgcatatgatacatcagttaacaaggcactggtgaaattaattttaagtattattgtctctttgtgtttttggtctcagaaaagttacgatttcccttagttccttagggcagagagaatcttcaatcactgaagtcaggagacacacattctatctgattttctacattatctgtttgaaaaggttacccacttattagtgttaaagccaagatatccagcaaggatagcaaccaactcttaaggtactctcccttaggaggattcctgattctttaatgttttctaaaaaagcaaaacaaacaaacaaacaaaacaaaacactaaatgttttctctttcaacttatttgaatacactcttttctcactgctctgagcatgaattcaatatttcagggcaaactaactgaatgttagaaccaactcctgataagtcttgaacaaaagataggatcctctataaacaggttaatcgccacgacatagtagtatttagagttactagtaagcctgatgccactacacaattctagcttttctctttaggatgattgtttcattcagtcttatctcttttagaaaacataggaaaaaattatttaataataaaatttaattggcaaaatgaaggtatggcttataagagtgttttcctattgttttcagtgtaggactcactgttctaaataactgggacacccaaggattctgtaaaatgccatccagttatcatttatattccctaactcaaaattcattcacatgtattcatttttttctaaacaaattagcatgtagaattctggttaaaatttggcatagaacacccgggtattttttcataatgcacccaataactgtcattcactaattgagaatggtgatttaacaaaggataataaagttatgaaaccaatgccacaaaacatctgtctctaactggtgtgtgtgtgtgtgtgtgtgtgtgtaagagggagagagagaaaatttcactccctccataaatctcacagtattcttttctttttcctttcctttccttgctcttctttctctcctattgctttcctttcatttccttctcataaaagaaaaataacaatatagaaaataacaaaatatagatggtcaacctttttaatattaaggttacctaaaatgccattatccaaagtggttctctagagatgctgatgtatatacttacatattttacagtgtattcaaataaagagtatattacataagacatatccttttgtaaccaacttttgtcattaacaatttactggacttgtcaacaaacctaaatctgtatcgtctataatggctacgttcattttggtatgaatcttaattacccctttctgcattatttaatgattttctcatatgtcactcttaaatgtacttctaatttttcactttacatcacataatgaatggatccaaatatgttatggatagatatcttcaaactttctacttacaagtagtgataataacagatgttctctctaaagtgtagttggtatcaattttactgacctttaaaaatatcttaatgggacaaagttcaaatatttgatgaccagctatcgtgacctttatctctgtggctctgtgggcctgtagtttttacgtgcttttagtgtatcatgattaaatattttgttttagtaaagacaccattatttcccaacttcatattcaaattgtcaaaggtattaatcctagagcagaactctcaaaagcaccaactctgattcctaacaaagcatggaaaagccctctctctgagtttcagatactcttttttgtgggggttgagtttcactttatttaaagtgagtcttaatcctccaacaagtcaacaagtgattggctggaatcacacgtattggaaaaccagcagaagagtaagtctttgcattttatgctactgtacctctgggattaattgctctttccctcattggccagtcactcttagtgtgtgattaatgcctgagactgtgtgaagtaagagatggatcagaggccggg[131 bp omitted]gggcgcggtggcgggcgcctgcggtcccagctgctggggaggccgaggcgggagcatggcgggaaccgggaggcggagcttgcggtgagccgagatggcgccaccgcactccagcctgggcgacccagcgagactccgcctcaaaaaaaaaaaaagaagattgatcagagagtacatcccctaagggtacatgcagataaatacaattaaggcgattaacatttcaaacacggtgactgtttcttacgtggacgacgttgtgttgaacatgggtgagtaagactgaagcagccgtaattactgcacgatgcgcatggtaaagaagcactccgttacggaaattatattctttgcccctctaatccttcactccacctgccattttcccacatgatttttttctttgctgttcttgtctaattgttattaataattaataaataacttatgatctaattgttattaataattaataacttatcatcacatgatttattaataaattaataaataacttatgatcaccgcatttccccaattcatttatctttctttcattttctctctttgtgtgttttctgtcttcatatttcagcacttgccacatatttcccacaaaatcatttatggtcaaacaacacttcaacgtgtagcatttgtatttctcaattcttcctcactttcttccttcagaatactaaagcttcttctctactgactgagtcaatggccaatggatagagtaaataattctgcggtatctaaatttgtattgattggactttcaagctcttgggagatgcatctttttcttttttggttcttctctgtgttctacatgggaattatcctggaaaatctcttcattgtgttcacagtaattattgactctcatttaaattccccaggtactgcctactggccaacatttatcttcttgatctgggtcttctcctacagttctgactttttcactaactgcagcatcatttcttttccaagatgcatgatacagatatttttcatttgtgtcatgcgtaaaaattgagatggtgctgctcataaccatggcatagagcaggtacactgccaatctgtaagcctccccattacctgaccacaatgaaccccaaaatgtgtgtttcctttgttggaggcatcctggatagtcaggataatccatgctgtatctcagtttgtttttgccataaacttgcctttttgtggccctaatagagtaggtagttttcactgtgattttccttatgtcatgaaacttgcttgtgtagatacttacaaactagaggttgtagtcactgctaacagtgggcttatatccatagctacctgtttcttattaataatatcctatattttcatttcggtaaccgtctagaatccttcttcaggagacttatctaaagcatttgtgtcatgttagatcacatcacagtagggattttgttttttatgccatgtatatttctctatgtgtagcctttgcctaaaacaacacatgattaatatttgttcattgttccttttgctatcacccctgtctaggatctacacattaagaaacaaagacatgaacgtctccatggaaagactgggaaaatggattgcaggttctagcaggatgtcataataaatggtgcatatccagagtgcaagatgattcagtctcaccaagaacactgaaagtcacatggctaccagcattattgtgataagaactactattttgggagatagtttagcaaaggtgccatgtagaaattgattaagtcagaggtatctttaacttgccaccacagagaagagattaatttcatatacttccattgagaagagagataagaatacaaaaccaagctgatttgcaggagtaaacttgatattcaaatactatttcctgaatgacattttctgagacatgctaattgtaattactttcagcttcaaaacataataaatttatctcatagtaagcatatagatggaataaataaaatgtgaacttaggtaaattataaattaataaagtatatttttaaaatttccattttactttctgtttaaattagaataagaaacagaaacaactatgtaatacgtgtgcaaagccctgaactgagatttgactttaccttgagctttgtcagtttacgatgctatttcagttttgtgctcagatttgagtgattgcaggaagagaataaatttctttaatgctgtcgagactttaaatagatacagacagagcattttcactttttcctacatctctattattctaaaaatgagaacattccaaaagtcaatcatccaagtttattctaaatagatgtgtagaaataacagttgtttcacaggagactaatcgcccaaggatatgtgtttagaggtactggtttcttaaataaggttttctagtcaggcaaaagattccctggagcctatgcatctgtggttgatattttgggataagaataaagctagaaatggtgaggcatattcaatttcattgaagatttctgcattcaaaataaaaactctattgaagttacacatacttttttcatgtatttgtttctactgctttgtaaattataacagctcaattaagagaaaccgtacctatgctattttgtcctgtgactctccaagaacctttctaagttattctacttaattgctttatcactcatatgaatgggaatttcttctcttaattgctgctaatctcccccatcttcatatactctaccgggcttctggaacaccacagcttcctggctttttctcctacctcctgggcaagtccttccctgtgtcttttgttgagtgttcctcatctgcttaaccaccaatcaacctattgcccctaatttgatctttggcctgttttcacttagattctatccctacgtatcacccattcccacagctttaattaccatctaaacactaggggctctcaaaccttctattttttctttctttctttctttcttccttcctccttttctttccttttctttctttcattctttctttcttttttaaggggcagggtctcactatgttgctgaggctggtctcaaactcctgacctcaagcaatctgtctgcttcagcctcccaagtagctgagaatacagggacaagccattgcacctgaccctggtactatttcttgagttcctgatccacagatctaacctcctactttcctggatgccacacaagatcttccactcaacaagtctgcaactaaactagccttcctcttttcaaacctactcttctttcagtgttctcagtcacaataatttgtaccaactagttacctagttgcacaacccaaaatctggggaaaataatagatttctttctccatagtaccccaaaatcaataaatcatcaagtcttattctaccttccaaagagccttacatatgttcctttattttcatctgtaacaccactattcctgtctaagcctacctatgtcatttttggaagagaatatagtcacctatgcgatcttcccacttaaaatcctattatctacgcttcagtaaaagaaaaaaaatttttaatctaagtatgtaattcttttgctaaagacaattcacatgcttctgtgcccttaaactggtatgttatcatggtatagtaggccatccaagacctggcttccttcctttttttcagtctcagagaataacatactctttccctgcaactccagatccaatttggttttcttttacttgcctggaaacttcaaattctatcaactctggggctttccactagctaatcattttgtatacaatatttgtccttcatgttttgcctcttaacatctcagctttcagtttcatcattttaccagggaggcctcccagaacctgagtccagaagagttccttccattgtatattcctctagcactacctattacctcttttgtaagactaacagccctcaaaatttttcattcagtgatgtcttcctcattgcattttaagttcaacatgagcaggactttgtcatgttcacctctatcacatcataaatatagcaaagagtaaaactattgcaacatgactaatgtattgaacgatgcttcagctttcttcttacgttcaatcacaggtcatacgactaaagaacttcctttttaatctccttttctattctcaattaatttcctctgcctgcatcacctcaagtctctggggtgaaatccactaatgaattccttttgcagcttaagccaattccaatcttgagccaatctcaggtgaagaagcctgtaaattatcactctcagtcctctcttgtactactaggtctcatgaactcttcattaacaactccagcttctctgttagcccaaaagccttttgctgcctagaaaacccatgattcatgcctcaggaaacagccttcaaatcacaacatgttctgtatctggctggccaactccctgcaacttatttctgcctagatgctccctcattcatttcaatacgctgttcggcctgctaccccagtttcccacttagaacaatggcacacaggacaggagcacattggcacatcagaatgacttatgtactgctcattgtgttgcagaagagacctctgtgggggcaatagaacagattttcctctcacgtcactgtagttgtggtttccctaagcacctacactgttttacctcatcttaggtagacaataatccatgtaactgactgtgtatcctaattttaaaaaatatttctgcccacattattctgcagtttttatcttgcttacgtatttttggaatgttactatttttcaaaaattaatttgggatcaaccaacatttcttattctgctgctgttctagagaaaatcattttcctcatttctgaacaagagaaaatgaaatacagctctaaacaaatgccactgtaaaccaaggtggagcctttgcactttcaggccaccatgataacctggagattagatttttctgtgtctttacatcaataataaagccaagcttctccaggggtatccactaggcttgtctcaatggctcaatacaggtccttttgtgaatgattacctcaccctcatggaaacacactcttgttacagaaactcagaatgattctattttttcttttatatttgtatatgtttttccaatacctctgaaaaaactgatccaaaaaaaaatacaaattttaattgtagccagtcaattcaggaaggacaaaggtcaaaaactttcaaagaaaccttcaaccccaacacactaaactttgggagcacaggttggcatccagaggtaaacatttgctataactgataacaggagaaggatccatttattcacctgttatcaattacaggcattgtatttaaagatcagatgttttatatttatttcttcaaatttcattcatggtgccataagtgaaggtatgtctgtccaccctgaatatattttcactccctcatctcagtcattccgaacaattcacacactaagattacccatgctaaatggggattcttttttactagccaatgtagtacctcaaatccttccttccttccccctatttcatcagcaggcaattcttttgatacttttgtcaaggggaaattgtgtgactcagagatctagtccccaagagaaactaataatgggctgggtattgtctgtctcagcagcatcagtgggtccctctcctgtgcagctaattagcttcctttccaatatgaagaatcttatatatagctttgtctttggggtattacataaatgaagattaagctatctgaatttctccttctcctaaaaatgcacatcctatgactgaaaagacaggtaaaagagatgcttttaattacaaaaccttccctgtcgtggttgcttctctctatccttctaaactccctttcaatttcttctcttctgtaacatatttgtgcccaaaatcttctgctttctgaaatattttatctttttcttccacactatctcttattttcaaattttaatcattaaattatattatgtcttataaaactaatcccacatataaacccctatgataatttcagtttgtccctagtatgaagttctttaaagatgtgtagttttctaactttcatgctctccaattcattataaacttcattttccactctgaaaaggagatgtgtgatctcgtctatttccatcctatttgaaaaccagatttagttttaaaccagaggaagggaatctcaagtctttacctcccacagtctggtgtgattctctctcttttggtattaccttcctccacattggaacactccagccaatgcataggctgagaggctatctcagattcagaaagatttggcctcatcccaggggagggtacagaggagctgatggctatgaattctgaaatggaactgttccaggttgaagaaataagaaagggaattgggaagagcaatgcccagtgaaaaagaagaaataatattttaggaagtgaatgctaattttattttaaacaaaataagaactcaaggaataagagggttcttccaataggttagagtgatcctgtcaaacatatatgcttctagatttttttaaagactgtttctaccaagaaagcatagaccactattgagaaagatcattaaactggaatttaggaggtctgccttctgattctgacttcttgaatgtattgttagccatttaaccacactgtgttgtttctcattctacctgtagaatctcaaagttctttcccacttctatacaaaactataattctgaacatcctttttgtttaatataagtctgcatttcctgtttgaagatatgtgtcccagaccctaaatgactgacaaattttaaatctccaataggaaagatgacaaactctatggaaacttggcttctgaagaactcctagaagctttccaaagtcatcagtgtttcctaagaaggcagagaaatcaaacacatggtcttttcctctagacaagctcctttgggtcatcaggatttcttcaacaataaaatgtaataattccaaatgtttgtaacagaatgggtaggactttcttcacttatttaaatactcccttttttatgcaactgagttttcatcaacaagtacaagcttgtgaaggagtactttaaaatgcaatttctctctatttttgtgggggctaatattttatttctcatattgacaatttattatgctgtttttagaaagttcattcatcaagtatttcttgagctttttctatgagacaggcactgttttaggcaagtaattatgcactgaacaatgcaaaaagtttccctgcactcatggactttaattttacatttatgaaaagctacaaatattagaataagtaaaatactgcctggaggctaaagcatattttgatcacttattccctaattcttttagaagagaactcacctgttggttagctgaaccactgccagtgatatccaactatacattcaatcccaccatacctcattatcacacttattcactcacaagcttaaactcttaacttttctccacatatcagtgactatttcctacagcttttcttttactttccatgtttgcagtgacaatatacataaacagtgtatgaaaactcaagtaaaatctactctctcaggtgttcataatgcatcaatgtatattgctttaagcctgaaggtaacctaagtaaagatgtaccatgttccaccaatgcttcttttgatcatcattttatcctgttttttctttaggattctttcttattccttcccctgacccttcttttattctccaaatttctttccaattcatctttgttcttccctttcctttttactctctttaaacattctatggactctgcctccttcacactgatattgaacgcccatagtttcatattttggattgcgattgttttattttaaaatggcaaatgttcatgttataaagagaatttttcagtctttagactaataggttcatgtagtttgggattttcctctttaagaaaattaattatcactcacactccaagacaaacaccatttcagtagcaatatgaatttcagtagtaataggaatctccaaatatgacaaagtaattcagacattaattgcttttgttttggaattgctcttataagatgaaatatcactttcatgatgagagtcctagagtgcttggtttatatattgtatcttagttttaacaggataaaacacttgatcctaagcagtaaacatgattcttcagcttcaacttcatttctttataaataactatttatgaattggtgttgagcttagcaagtcaccaaacaccttctgctcagcagcataaaggacatttccatgaaacctcccagggataatcttatttactctataatgtttcccgggttcaattcctctcccaaaatcctttgttcttaagcccctatgatctgggtgatctaaatatgggtaagaagtccagggatagcactatgaatgaagtgaaaatagtaaaacatagttaaaaatgtacagatgctctctgacttataatagggttatgtcctgataaatccatcataagtcaaaaatgcatttaatattcctaatgtacctcacatcatagtttggcctagcctaccttaaatgtgctcagaacactttcattagcttatataagatcacctaatacaaagcctattttataataaaatattgaatagctcacgtaatatactgactactatactcaagtacagtttcttctgaatgcatgtcactttctcaccattgtaaagtcaaacaattataagtcaaactatcacaagccagggaccatccatatgtatttcattcagaaaatgctggaaaaagcatttaggagaatatctagatgagagaaggtagaaagccatgcacaaattcactgagagtttaaaaaaatgcatgcatattgtggagatagaaatcaaatctatttgtttccatctgctgtattcttcccaaaatattatctcttcttatcccattgtactatattgcatttctttgaccatttattgtgtatctcttaatatttcccacttcatcattactaacctcactcactctgaacttgatgagagcacctgagcattaatttttcttataattatttaatgattaccagaattcgttcagtatggccagctctggtcaaagtgaggcaggcaagatgctttgtcaactgcctggatggaatgtctcaaaaggtttccatttcatggtagcattatgcaaagttcaagacgtttaatcaagacccttcacttacttaactatacctccttgagaatcccatctatgaaaaaattctagtcattataaaaatgattgattaaatgagggaagtagtagagttcttcatttctttagttggtttagtctcctatgagtcaatcctagttttcaaaattcttaataaaccatttattccttcaactttctatgccatttgatgttttgtaaaaaaaaatataatatgtatacaaaaagatatttcaaaatctagaaagagagctttagagctttgtaaagctcttttaaaaatcaaaagcaactactgttaattaacatgttgtactatgcaatttctttaccattattactcttagtatttttaagaaaagtctttccattgttattataaatgcttctattgatatttattttaataactgttattacagtccgtcatgtacatacactatacttaaacctaatgtttggtatttaaatcgtttcaagattttatcactgtcaacaaagtatgatgaatatttttatgctgaaaacttctgtaaaaatagaattccaagagtattattgcaccaaaaggcatggacttaacattcttgatacatgatttcaaaatattttctttaaggtttgaatcagtctatattccctccagcagcgtataaaagtgccaatttctctgatccttagccagtttgggtaataaaaattgtaaaacttttttttctttttttttgagacagagtctccctctgtcgccaggctgaagtgcagtggcgcaatctcggctcactgcaacctccgcctcccggggtcaagctattctcctgcctcagcctcccaagtagctgggactacaggcacccgccaccaccatgcccagctaatttttgttatttttagtagagatggagtttccccatgttggacaggatggtctcgatctcttgacctcgtgatccaccctcctcggcctcccaaagtgctgggataacaggtgtgaacaaccatgcccggcctgtaaaactttttcctaatgtaacagaaacataatagtattacattttatcatatttctttgatttctaagacacacatacacacacacacacacacacatatctgtatatacaaatacacgtatagcttacattttaattcttccttcatttcatttgttcatttattaggtcttggagattttgtgaaactgtttaaattcttttttatactatgaagatatcaaccttttgtctctacagcatttcaaattcaagtatgattcacgtgttagtttggggtagatcattataggcacatgtaggaaacagctttcagagatgccttaaccgtaattatgcatttgtattctaatttttatttaatgttattattgattgcatttttaaagattctgtattttttaaaccatttatttgtatatattggtatacaatcttgccattttctgggatttcatatttccttatttttgttttttaccttttttggcttgaattttttgagtttttatgcattcttttccagtttcttaagatgctaataagttcatctatttgagcaattgagaacatttaaagcaatagactgcctctgagcacagctttgtccatattacattaaccttttataccctgggttcccactagtttttaaataatctactatcaaataaaagatttgttaataataaattttaaatcattaacacttaacgcattattttcagtcacactaagttgattccttcgtttctttcaggttgcttcacagtcttcccttctatctgattcagtggaccaagtaaatgactctctggtaacagaatttgtattacttggacttgcacaatccttggaaatgcagtttttcctttttctcttcttctctttattctatgtgggaattatcctgggaaacctcttcattgtgttcacagtgatctttgatcctcacttacactcccccatgtatattctgctggccaacctatcgctcattgacttgagcctttcatctaccacagttcctaggttgatctacgatctttttactgattgtaaagttatttccttccataattgtatgatacaaaagttctttatccatgttacgggaggagttgaaatggtgctgctgatagtcatggaatatgataggtacactgcgatctgcaagcctctccactatccaactattatgaatcccaaaatgtgcatgtttttggtagcagcagcttgggtcattggggtgattcatgctatgtctcagtttgtttttgtcataaattaaccttctgtggccctaataatgtggggagcttttattgtgattttcctcgggttattaaacttgcatgcatggacacttacgggctagaatttgtggtcactgccaacagtggattcatatcgatgggcaccttctttttcttaattgtatcatacatttttattctggtcactgtccaacgacattcctcaaatgatttatccaaagcattcttcacttcgtaggctcacatcaccgtagtggttttgttttttgctccatgcatgtttctctacgtgtggcctttccctactaagtcattggataaattttttgccatcatgaactttgttgtcacccctgtcttaaatcctgccatctatactttaaggaacaaagatatgaagtttgcaatgagaaggctgaatcaacatattttaaattctatggagacgacataacacatttggttgatgagagcacaggataaatgccatggaccatcaagactcctgtgatcaccatgatcactatggaacgcgcacatttttagtattgcctgaaaaaactgaaaaatctgcaaaaaggatgcattaaatctaagaattgtatttcagataaagttgcaacattttttgttaatcataaaaagtatatatttctatctaatgtgtgtatctaattaacagcaatgactatctttaattttgatgtagttattttatatctgtatataagcacatacacatatatatgacctaggtttatttatcagtatttttatgctgataataagcatcactggaaattaattttcttatggaaattatgtggatccaatggataaaatatgagtttatataaattagtaaatgccaaaatcaaggaagaaacaatttttattttaattgtactttaagttagataaatggtaaggtcaacagcttgttacaacccttaagtattattttcaggctgattgtcaatatgttttgtacaatgttctcacttataggtgggaattgaacaatgagaacacatggacacaggaaggggaacatcacacaccggggcctgttgtggggtggggggaagggggagggatagcattaggagatataactagtgttaaatgacgagttaatgggtgcagcacacccacatggcacatgtatacatatgtaactaacctgcacattgtgcacatgtaccctagaacttaaagtataataaaaaaaatagactctagtactctgtattatgcaaaatttgtctatgttacacttttttaacaacacaatcctattgcccttgaaatcttcttcaaagcatttctcgagtcactcttaaaaagcatctacaacctaaaagtataggaagagatttatttcctggagaagagaccccattgagatcttaaaagcacatataatgtgcctgtgcttaacttaaggtgcttaggacaaagaaggcgattgacatctttcaggtaaaacctggtaagtttggtggtcaaggaacacaactgagacatcacttggatgtatttctatgactattttaagaaacataaattgtggtgactcactcagctcacttttaactactgcatggtaattaaagatgcaaaataaaataagttacaagaagtgaggttttttattggttaaagcaatttttctatattttctccgcaagttggtcataaaagttctaagcattcctctttttataaaatcgaagcattattacttactctcttgttaacctatctggattttaattttgtaactttattatatttgttttgctgtgattctttaaaaagcacctttagactcagtgagatagcaaaaatatccaaataggccaaaaaattgtggcaatgtcctctcactcaggaaaattctgtgtgttttctctaatggccaagggaaaacttgtgagactataaaagttagtctcagtacacaaagctcagactggctattcccagatctcttcaggtacatctagtccattcataaagggcttttaattaaccaagtggtttactaaaaaggacaattcactacatattattctcttacagtttttatgcctcattctgtgaaaattgctgtagtctcttccagttatgaagaaggtaggtggaaacaaagacaaaacacatatattagaagaatgaatgaaattgtagcattttattgacaatgagatggttctattagtaggaatctattctgcataattccattttgtgtttaccttctggaaaaatgaaaggattctgtatggttaacttaaatacttagagaaattaatatgaataatgttagcaagaataacccttgttataagtattatgctggcaacaattgtcgagtcctcctcctcactcttctgggctaatttgttcttttctccccatttaatagtccttttccccatctttccccaggtccggtgttttcttacccacctccttccctcctttttataataccagtgaaacttggtttggagcatttctttcacataaaggtacaaatcatactgctagagttgtgaggatttttagagcttttgaaagaataaactcattttaaaaacaggaaagctaaggcccagagatttttaaatgatattcccatgatcacactgtgaatttgtgccagaacccaaatgcctactcccatctcagtgagacttactataaggacataaggcatttatatatatatatattatatatactatatatttatatatattacatattatatatatataatatatattatataatatataatataaatataatataaattatataaatataatatatattttattatataatataatatatattatataatataatataatataaattatataaatataatatatatattattatataatataatatatattttattatataatatatattatatattatagaatataatatatattttattatataatatatattatatattatagaatataatatatattttattataaaatatatattatagaatataatatatattttattatataatatatattatagaatataatatatattatatttatatataacatatattattatataaaatatgtataatatatattatataaatatatttatatattatataaatatatatattatatataattctaatggttgaattccaagaataatctatggcatgaaagattttacctgtcaacagtggctggctcttcatggttgctacaatgagtgtgtaagattctgaagaactcctttaataagcctaaacttaatgttcaacttagaataaatacaattcttctaaatttttttgaataatttttaaaaagtcagaaatgagctttgaaagaattatggtggtgaaggatcccctcagcagcacaaattcaggagagagatgtcttaactacgttagcaagaaattccttttgctaaagaatagcattcctgaattcttactaacagccatgatagaaagtcttttgctacagatgagaaccctcgggtcaacctcatccttggcatatttcatgtgaagatataacttcaagattgtccttgcctatcaatgaaatgaattaattttatgtcaatgcatatttaaggtctattctaaattgcacactttgattcaaaagaaacagtccaaccaaccagtcaggacagaaattatctcacaataaaaatcctatcatttgtactgtcaatgattagtatgattatatttattacagtgctaagcagaagagaactgaagtgaatgttcatgatttattccactattagacttctctttattcttaaaaatatttaagatcactaaatttttataggactttaaaaacagtaatgtgctgctttgagtgtgtaggactaagaaatgggattcagagtagtaaagagaaaagtggaatttccaagcactatgaattactgttctttaaaaaacagcaaaaatcaaataacagtattcctccaaaaaagatggcaagtgtaaactctataccttcatgtctcccgtggaatgttagtgatcaatttccacttctctcttttacatcttacttgcccattaactcttatacctaatccaaagattgttaatatggctatgcctcactttcaggacaccttttatttgttacttctcttcactgcaaaacttcttgaaacagtacttattttctctcctccatacacaattgaaatggctctcaactcatgcccagaagtcagtgttcagtctctcacctggcagatagcaacttacaaagatgccccaacaatacctccttgtgtctagacagtcatcattatcctttacctttttctgtatttatttctgctcctaaaagggatctctatgtaaagtattgttatactagtgcttgttataattattatcagagttaaagccatcacaatgttcccaattacttaaagacattggaataacattttttttattttccacatcttgccaaaaaatattttgttatcagtaccttaataatggctattatatattgaccattactatttgctagaaaatttatatacctggtcgtatccaatcctcacagaacttctataaagttgtgctattatcacctatattttccagatgtggccgtaagactgaaatcacttaggtgacttgtctaaggtcattcagatacatagtagataacccaggatttgaacacaggcctcctagcacacaagctcatatcttaactactttaatacgttgctcgatgggatcttacaggtcttcattcacccctttcctgctcacacaaccacaacctgcagttattacctactgttaggcttaaaataattacttggcttcatttccaagctccctcccttccaattcacattgagtccagagctaaattaaacaatcattcaaaatttttcagtagttcttgtctctataataaaacagaaatgctttagaaagcattccaaaatctcttaccagttttatctcctatgaaagtccttcacactttctctcatttaaactttattgcattttcctcactttttctcacttcacttttgaattccctattcttttatcctctgttaatttttaagtattatatttgtgatattattttttctttttttctattttttatctttcatttcattttggcctatttttttctcttaagaactttaatatcaccaaataacatgtgtgctacaaactgttttgtagttcaaagaaaaaggagataaacatagagttatggcatagacttaatctggcagagagacaagcataaataatggtattttatattaggaataaacctaacattaatggagacactgagaagccgagataactgaattataaggcatagccagggaagtagtgcgagataaaattatgatcttgttgaattctgaatgtctttaagtaatagattatagaaagtcactgtaagagtgagcagaatgatataaaatgaggctttgaatttgaatataataattctgacttccttctccttctcttcttcaaggtaactgcagaggctatttcctggaatgaatcaacgagtgaaacgaataactctatggtgactgaattcatttttctgggtctctctgattctcagggactccagaccttcctatttatgttgttttttgtattctatggaggaatcgtgtttggaaaccttcttattgtcataacagtggtatctgactcccaccttcactctcccatgtacttcctgctagccaacctctcactcattgatctgtctctgtcttcagtcacagcccccaagatgattactgactttttcagccagcgcaaagtcatctctttcaagggctgccttgttcagatatttctccttcacttctttggtgggagtgagatggtgatcctcatagccatgggctttgacagatatatagcaatatgcaaacccctacactacactacaattatgtgtggcaacgcatgtgtcggcattatggctgtcgcatggggaattggctttctccattcggtgagccagttggcctttgccgtgcacttacccttctgtggtcccaatgaggtcgatagtttttattgtgaccttcctagggtaatcaaacttgcctgtacagatacctacaggctagatattatggtcattgctaacagtggtgtgctcactgtgtgttcttttgttcttctaatcatctcatacactatcatcctaatgaccatccagcatcgccctttagataagtcgtccaaagctctgtccactttgactgctcacattacagtagttcttttgttctttggaccatgtgtctttatttatgcctggccattccccatcaagtcattagataaattccttgctgtattttattctgtgatcacccctctcttgaacccaattatatacacactgaggaacaaagacatgaagacggcaataagacagctgagaaaatgggatgcacattctagtgtaaagttttagatcttatataactgtgagattaatctcagataatgacacaaaatatagtgaagttggtaagttatttagtaaagctcatgaaaattgtgccctccattcccatataatttattaattgtctaggaacttccacatacattgcctcaatttatctttcaacaacttgtgtgttatattttggaatacagatacaaagttattatgctttcaaaatattcttttgctaattcttagaacaaagaaaggcataaatatattagtatttgtgtacatctgttccttcctgtgtgaccctaagtttagtagaagaaaggagagaaaatatagcctagcttataaatttaaaaaaaaatttatttggtccattttgtgaaaaacataaaaaaagaactgtcacatcttaatttaaaaaatatatgcttagtggtaaggagatatatgtcaacttttaagaggttgaaaaacaaacgcctcccattataagtttatacttcacctcccaccactataacaacccagaatccatgagggcattatcaggagtgagtggaagagtaagtttgccaatgtgaaatgtgccttctaggtcctagacatctgtggtataactgctcataagcagtagaaagaatttagagggatccaggctctcatcacgttggcacaaagtatattacttggatccatctatgtcattttccatggttaatgtttaaaaccacaggctttaaagtaaaaaacaaagagctggattcaactctactgactcttattaatcatgattttgggcacattacgtagctttcatgagctttagtttctacatttataaacaggagattatacctattatgcacggttattatgaaggaaaatgacaaaatagatataaatcaaatagcccacttcgagacatattaagcatgaataaacattagatactattaaaatcctatatattaacaaagccaaaagtttcaaactttactttttcccaacattcttgtgaaatatgacacatcccaatcttaacagatgctcatttgggatactgtacttgtgagtggaagtgtgtatatttgtgtgcaagtgtgtactcatatacttccaccttaccaccctagaaaggcatgatgaaaatttaagatagaaggaaaatataaattgaaaaaaaaaaaccttaacaaatgattctgacaaatatcttctctttccagggagaatcactgagccagaataaaattgaacactaaatattctaagaaaaaaggaatctagtttgtcaaaatgtgacttgaattaatagataaggagagtcagatgataagagggtcaaaattatgtttatcttaggaaaagtagaatagaaaatttataagcagattaaaaacacataataaaagtagtaaataataatgacagtatctcaaatcagtgcaggggggaaaggcctactaatgtgatggtgggataattggatagcaatatgggaaaagatatatttaatttatttgctacaccaaatgccaggacaatctctaagtgaattcaagacataactcttttttcaaaaaaactatgcaaatattaaaagaaaacaagttaatgtttttataatctatgaatatggtaaagatggataacattgactatcaaattaatttttaatgcgtaataaaactatgagaaaatttaaaagtgagaagaaactacttgtaactcacataatagactagtacttctaacacatagggaacttctaaaacaaaacccaaaatattaataggaaaatgggcaaaacagttaaacttacagttcatacataaggagaatcagtcttttttttttttttacagttgtaggcagaaaacttttatttttcatttatttgtaaaatttacccctaatttattcataattcatttaactgctaagggcattaatgtgtacaacgccatgggagaaaccagtatattcagaatttctcctgaaatttgaccagaagttatggacatccctcccctgggaaggaggcaggcagaaaagtttggaatctatgtagtaaaatatgttactcttttatatatatacatatatgtgtgtatatgtgtatatatatatacacacatatatacatacatacatacatacatacatacatattatctgaattaggcctggtcttttttaatactttaagttctgggatacatgtgcagaatgtacaggtttgttacacaggtatacacgtgccatggttgtttgctgcacccatcaactcaccatctacattaggtatttctcctaacgttatccctctccttgcctcccacctcccgacaggccctggtgtgtgatattcccttccctgtgcccatatgttctcattggtcaactcccatttatgagtgagaacatgcggtgtttggttttctgttcttgtgttagtttgcggagaatgatggtttccagcttcatccatgtccctgcaaaggacatgaactcattcttttttatggctgcaagaaatgcaaatcaaaaccacaatgagatgccatctcacaccagttagaatggcaatcattaaaaagtcaggaaacaatagatgctggagaggatgtggagaaataggaatgcttttacactgttggtgggagcgtacattagttcaaccattgtggaagacagtgtggtgtttcctcatggatctaaaactagaaataccatttgacccagcaatcccattactgggtatatacccaaacgattgtaagtcattctactataaagacacatgcacaggtatgtttattgcagcactattcacaatagggaagacttggaaccaacccaaatgcccgtcaatgttagactagataaaatgtggcacatagacctggtcttaaaatcaagaacagagattgttacttttacatccattcctaattgataaaccattcagttataccacatcttagcttctggactacaatgaccatatttggggttttctttctaatttcattataggttcagagggtacatgtgcaggtttgagacaaaggtatattgcatgatactaaggtttggagtacaaatgatcccacctcccaggtagcaagaataatacccaatatgtagtttttcaactctttcccctcttcctccatcctccctctgctactctgtggtgtctgtttttctcatctttatgtccatgtgtactcgatgtttagctcccccttgtaggtgagaacatgtggtatttggttttctgtttcagtgttaattcacttaggataatggcctccaactgcattcatgctgctgcaaaggatgtgactttcttcttattagctgcatatattttgtggtggatttgtaccacatttactttatctagtccaaagttgttgggcacccaggtggattccatgtctttgctattgtgaatagcactgggacaacccatacaagttcatgtgtctttttggtaaaacaatgtattttcctttgggcatatatgcggtgatggaattgctggatcgagtggtagtttaactcttagttctttgagaaatccccagactgttctccacagtggctggactaagttgcattcccaccagcagtgtagaagtgttccccattctctgtagcctcaccagcacatgttaaactatctttaaatatatgaaaaaaatgttcaagtctctcagattaagatgcatgcaaagtaaaatgatacttaaatatcagttctaacctataaaatatcaaatatctgacctcaatatttgataatccaacctgttgatgaagctgtagagagaggcactctttttttttttttttaattatactttaagttttagggtacatgtgcaccttgtgcaggttagttacatatgtatacatgtgccatgctggtgcgctgaacccactaactcgtcatctagcattaggtatatctcccaatgctatccctcccccctccccccaccccacaacagtccccagagtgtgatattccccttcctgtgtccatgtgatcttattgttcacttcccacctatgagtgagaatatgcggtgtttggttttttgttcttgcgatagtttactgagaatgatgatttccagtttcatccatgtccctataaaggacatgaactcatcattttttatggctgcatagtattccatggtgtatatgtgccacattttcttaatccagtctatcattgttggacatctgggttggttccaagtctttgctattgtgaataatgccgcaataaacatacgtgtgcatgtgtctttatagcagcatgatttatagtcctttgggtatatacccagtaatgggatggctgggtcaaatggtatttccagttcgagatccctgaggaatcgccacactgacttccacaatggttgaactagtttacagtcccaccaacagtgtaaaagtgttcctatttctccacatcctctccagcacctgttgtttcctgactttttaatgattgccattctaactggtgtgagatgatatctcattgtggttttgatttgcatttctctgatggccagtgatgatgagcattttttcatgtgttttttggctgcatagatgtcttcttttgagaagtgtctgttcatgtccttcacccactttttgatggggttgattgtttttttcttgtaaatttgtttgagttcattgtagattctggatattagccctttgtcagatggtaggttgcgaaaattttctcccattttgtaggttgcctgttcactctgatggtagtttcttttgctgtgcagaagctctttagtttaattagatcccatttgtcaattttgtcttttgttgccattgcttttgtcccactgatcccacagaaatacaaactaccatcagagaatactacaaacacctctacgcaaataaactagaaaatctagaagaaatggataaattcctggacacatacactctcccaagactaaaccaggaagaagttgaatctctgaatagaccaataacagaagctgaaattgtggcaataatcaatagcttaccaaccaaaaagagtccaggaccagatggattcacagccgaattctaccagaggtacaaggaggaactggtaccattccttctgaaactattccaatcaatagaaaaagagggagtcctccctaactcattttatgaggccagcatcattctgataccaaagccaggcagagacacaacaaaaaaagagaattttagaccaatatccttgatgaacattgatgcaaaaatcctcaataaaatactggcaaaacgaatccagcagcacatcaaaaagcttatccaccaagatcaagtgggcttcatccctgggatgcaaggctggttcaatatacgcaaatcaataaatgtaatccagcatataaacagagccaaagacaaaaaccacatgattatctcaatagatgcagaaaaggcctttgacaaaattcaacaacccttcatgctaaaaactctcaataaattaggtattgatgggacgtatttcaaaataataagagctatctatgacaaacccacagccaatatcatactgaatgggcaaaaactggaagcattccctttgaaaactggcacaagacagggatgccctctctcaccactcctattcaacatagtgttggaagttctggccagggcaattaggcaggagaaggaaataaagggtattcaattaggaaaagaggaagtcaaattgtccctgtttgcagacgacatgattgtatatctagaaaaccccattgtctcagcccaaaatcttcctaagctgataagcaacttcagcaaagtctcaggatacaaaatcaatgtacaaaaatcacaagcattcttatacaccaacaacagacaaacagagagccaaaccatgagtgaactcccattcacaattgcttcaaagagaataaaatacctaggaatccaacttacaagggacgtgaaggacctcttcaaggagaactacaaatcactgctcaaggaaataaaagaggatacaaagaaatggaagaacatgccatgctcatgggtaggaagaatcaatatcgtgaaaatggccatactgcccaaggtaatttacagattcaatgccatccccatcaagctaccaatgactttcttcacagaattggaaaaaactactttaaagttcatatggaaccaaaaaagagcccgcattgccaagtcaatcctaagccaaaagaacaaagctggaggcatcacgctacctgacttcaaactatacgacaaggctacagtaaccaaaacagcatggtactggtaccaaaacagagatatagatcaatggaacagaacagagccctcagaaataatgccgcatatctacaactatctgatctttgacaaacctgagaaaaacaagcaatggggaaaggattccctatttaataaatggtgctgggaaaactggctagccatatgtagaaagctgaaactggatcccttccttataccttatacaaaaatcaattcaagatggattaaagacttaaacgttagacctcaaaccataaaaaccctagaagaaaacctaggctttaccattcaggacataggcatgggcaaggacttcatgtctaaaacaccgagagaggcactcttatgcattgttggtgagaatacaaaatggtacaactcttggcaatatcttaaaaaatttacatggtactgacttttggtctagcaatcctacttctatcctaaagatatattggcaaaaatacaaaataattgatgcacacaagtctattcattgaagcattgtttttcatagtaaacggaaagtaggccgggcgtggtggctcatgcctgtgatcccagcattttgggaggctgaggcgggcagatcacttgaggccaggaattcaagaccagcgtggctaacatggcgaaaccccatctctaccaaaaatacaaaaattagctgggcgtggtggtgcacacttgtaattccagctacttgagaggctgaggtgggaggatcgcttgaacctgggaggcagaggtttcagtgagcccagaacgtgcctctgcactccagccaggatgacagagcaagactccatctcaaaaaaaaaaaaaaaaaaaaaaggaaaataaccaaatgacaattagtgagtactacttgcaaaacttgtacgcaatagagtatgaagcaactataaaatgagagagaaatatctccaaatactactctaaagtaatctacaaggtataccttaactgaaaagaaacaaaaaagtgacaccagaatgctatttttatgttaaaacagggataaatacattggatttacatgcatatataagtatatattttataaatgtttaaataagcatacttaaaatggcaaaaacataatacatatataattttcttatggcaggaggaggaaacagggcaaggcacagggataaaagttattctgaatacatcttattttatatttttgactttgaaatcatgtagctgttttatgtaatataaaaatgtaattaaattaacagaaaaaaattacaactgctaaaaatcaagatctggctttttaattaagttataaaacatcggagaaaagaattgtttcatgggacactaacatacagacaaattcatttggaacccaatgaattaatgggcctaagataacaaccaatagaagctaaaatgacgaataactgtttcagaagaaaacatatatggaatgaatcagctgaaaatacctgaacctactgatcaatttttatatgtcacatgaagtgaatacacataaagtataatatggagcacatagaaccaactagaaatgagcctaattggtaaatattctctattttatgacaatatacaggaaatatgtcgaagagagaaacatgcaagaacaccgtagggtttaataagataatcacaaggtatggaatattcaacaggatgaatatcctggattattcagcaaatacacagagctaaaaagcaggagaaaggaattcatatatatttttaaaaactaaaaagatatattagctgatgcaactttgaaacttctttagatcctgattcaaatagagcaaatttaacaaatatatttgaaactattaaaataatttaaaaatgactaagtatttgattatatcaaatatagacaataataaccttgaatgtacatggattaaatgtccacttaggggctgggtgtggtggctcatgactataattccagcactttgggaggccaaggcagaaggattgcttgaggtcagaggttcaagtgcagcctggtcaacacagtgaaaccctatctctacaaaaaacaaacaaaaataaaaaattaactaattttaaaaaatatatatttcttctaaattctccacctgaaagatatagactgactgaatgaattttaactatgatctgactatgtgcttccctgaacaaatgcactttacctgtaaaacacatattaactaaaagaaaagagatggaaaaaggtattccatgaacagaaaccaaaatgagtaggagtagctatacttctgtcagacaaaacagactttaagtcaaaactagctttagaaaaaagacaaaaatgcttattatacaacgataaaggaatcaatccagaaagaggatataacaattttaaatatatatgcagccaacactggagcagccagattcataaagcaaatactactagatcaaaacagagaggtagactcaaatataataatagtgaaggacttcaacaccccactttcagcattaaacagatcatctaataagaaaaccaatctcgcagccctcaccctggagagtccacagggaccaggggttggtctgaacccccagcacagagcacctgcctcacagaagagtggctgcatttttcttcctgcagttttcagtcctcacttctccttaccaagcagggccgcctggcctgggactcctgtacaactaccctgccccccacctgaccacttcaataagaagtagcccagcatttctccaaggaggaaataccagagtcaattcacaaccactgcaattgtagtggtaccaccataacagcccttgggctgcagaaggaactaagagtctaatcactacagtggcaccttcagcacaccacagccaccatacagagaggaatccagccccctcccctgggaacccccaccacccactccaccaggcacagcacccagctcataactgcagatcagttgccccacccacagctgagcttacctactggcagtggcccagactttccctagggagaggctcccagaggcaaacggcagcctctctgcccctgtcacagcagcagttctatccatgctgtcctcaggcttggaaagaaacaaagcgcctgaaggctgcacctgaacttacagcatgccacagttcccatacggagaggagaccagtctcttctcccagtgagccctaaaccccctgatccccaacaagcagagccctaacctcacaccagcagtacagctgctccatcccccaggctgaacattcccagtaatagcagctccacctggagatggagcccccagggtcaaccaaaagcccctctgccactgcctctacagtggtactacccctgctacccttgaactaacaaaggagcaaagaccccagtgctttatccacacctccaacaagctgcagtcgaccacaaagaagaaacaagtctgtctcccatgggtcctacccacaccccctgctgttcaccatgaatgatagagtcaacagtgtgaaaacgaccatactgccaaaagcaacctacaaattcaatgcaattcccatcaaaataccaccatcattcttcacagaactagaaaaaacaaggctaaaattcacatggaaccaaaaaagagcccacatagccaaagcaagactaagcaaaaagaataaatctagaggcatcacattactcgacttcaaactatactataaggccatagtcaccaaaacagcatggtactggtataaaaataggcatatagaccaatggaatagaatagagaacccagaaataaagccaaatactttcagccaactgatctttgacaaagcaagcaaaaacataaagtggggaaaggacaccctattcaacaaatggtgctggtataattggcaagccacatgtagaagaatgcaactggatcctcatctctcaccttataaacaaatcaactcaagatggttcacagacttaaatctaagacctgaaaccataaaaattctagaagataagattggaaaaacccttctagacattggcttaggcaaagacttcacaatcaagaacccaaaagcaaacacaacaaagataaatagatgggacttaattaaactgaaagccttctgcacatcaaaataaataatcagcagagtaaacagacaacccacagagtgggagaaaatcttcacaaactatgcatccaacagaggactaatatccagaatctacaaagaattggaacaaatcagcaagaaaaaaaaccaaacacaaggatgacagtggaaatacaaaaacaagacataaatattctgaatagtgataataaaacagtgcataccagaatacaaactgtttccaagttacaatggttcaaccatttttcagctttatggtggtgtgaaagtgatatccattcattagaaaccatgctccaggatgggcgcagtgggtcacgcctgtaatcctagcactttgggaggccgaggagggcggatcacaaggtcaagagatcaagaccatcctggccaacatggtgaaaccccgtctctcctaaaaatacaaaaattagctgggcattgtggtgcgtgcctgtaatcccagctattcgggaggctgaggcaggagaatcacttgaaccagggagtcggaggtgttgcagtgagccgagatcgtgccactgcctccagcctggcaacagagtgagactccatctcaaaaaaaagaaagaaacccgactccgaattttgaattttgatattttcctggactaccaatatgtggcacaatgctctctcacaatgttgtgcaacagcggtgagctgcagcttccagtcagccaaatgataataaaggtagataatccatcttgatatcttcctgaagaacataatgcctgcctaccatcaacaggcatcaatactttctaccagctattctcaaccctcatgatcggaagagacagagactgactgtgtcaaagtattagtcccatcattcagcaattaaccttagctcaatgcttcaaaaattcttcaggccctgtgtaatttcagctacgtacattaatgataagtacccatacaaccattctgtttcttattttcagtaccatatttaataaatatcagttattcaatactttatttagacattttgttagattattttgaccaactgaagtctaatctaaatgttctgagcatgttcaaagtaagctaggccaacctataattttcggtgtgctaaatgcatttttaacttatgatattttcagtttacgggggtttgttgagacataacttcatcatacatcaaggagcatctgtatatgggatacagttaaagcagtgatcagaggaaaatctatagccttaacacatttattaataaaagtgtaggaattaaattatcagctgaaaaatgtaaaaagtatctaaaagagtaagcagaaagtacaagaaagaacccaaagtagaaaaaagtgaaaattaataaaataagaagccaaaaaacagatcaaatcagtaaaccaaaaatcttgttctttaaacaaatcaacaaagttgacaaaaaaattagatcttttaatcatgaataaaaaaaaagagaaagcacaaaaatgaataaggaatggtgagagaaataactattgataatcagcaaataaaaaatcattaaaaacaatgttgttcacatctatgaaaaacattgaaagctagagggaatgggtaattttctagaaaaatacaattcaccacaactgacttcaaaaaaaaaaaaaagaagtacagcacttatgtgagcaatttccatagagaaatacagttgtcatggaattataacacacacacaaacactaggtttagatgttttcacggagaattccaccaaacctttagaaatcagatcgtccaaaggcaaattaacaaccctcagccatttgcggcaaaatattacaattgaggcaagatatactgtactgaaaacttgaggaaaaagcaggagagaaagttcctttgggaaattcgaatactcaaaagtgcttacatacaatgaaaaatttggaaatccataagcatggccaaggtgggacacatgctcagaaaaggcctgagaagacactaataactcacctttagtaattcctaggctcacagcaagaaaaaatgaaggctaaggcagaattatacatggctccgctaagtgttgagggagccccaatacagagtcagtaagcaaagtctgggagatgtttttcatatttttttcttttttggctacttgcagtcaaggaaatcatttttaaatcactaaatgctaaatgaacacaagctaaaggaaccgagccgccttcaaacatcaaacataaaaaagaatgcagatattacaaaaccagtttacaaaagttactaaacaaataaaaactacatcccacagtgggtaacaaaaataaccttgaagaagggaaaaatttggtttccagaataaacacattataatatccaaaatgtccagttttcaacaaaaattaagaagcatgcaaataaacacaaaactatggcccatttacagaagaaataaatgagactctccctgagtaagcagatattggaaatattagacaaaaactttatataactgtcttaaataaacttaaagagctaaagaaacccaagagaatgacatataaataaataagaaatatgaattttttaaaaggtacaaaaaaattctgaggctgaaaagtacaataactaattaaaaagttactttttacttagggttccaatagaagatttgagcagctggaaaaaagaatcagtgaacttgatagatcaagtgaaatgattcagtctgaagagcaggaaaatgaaagaatgacaacaaaaaagaatagagcctaaagacctgtgtaacaacatcaagaatgcctacatacagaatcctggtggggagtgaggggcaggaagactatttgaagaaatgtgtttgaaagcttcccaaatttcactaaaaacaaatatatacattcaaaaagctcagtgaacttcatcaaggaaatatacaaagatattcacaccaagacacactatgtttcaaattgtcaaaaggcaaagcgaatgtttgaaagcagcaagagaaaggcaacgcgtcatttacaaaggatcctcaataagtttgacagcagatagtgcattataatccatggatgccagaagagcttaggaaaaaggcaatgcatcatttacaaaggatcctcagtaagtttgacagcagagagctcatgataaaccatgggtgccagaagagcttagaatgacattttaaagttctgaaagaaaaaaacactgtcaaccaaaaattctgtaacttggaagatgccccttcaagtattaaggataaattacacattcccagattaaaaaaaaaaagagagagagaaagagaaagaaagaaagaagagagagaaagaaagggagagaaagaaaaagaaagaaagaaagaagagagagaaagaaagggagagaaagaaaaagaaagaaagaaagaaagaaagaaaaagaaagaaagaaagaaagaaagaaagaaagaaagaaagaaagaaagaaagaaagagaaagaaagaaaagaaagaaagaaaagcaagcaagctttaaaagttcatgtttggtaggctgtacttcaagatacactttaaaaaaaaaaagactccttcagatacaaactaaaaaacactagaaagtaactcaaaaccacataaagaaataactccagtaaggataactacataggtaaatataaaaggaattatcatattttttgtaagtctttttaaatattctatatgttttaaaacaaatgtgtaaaataatgactataaatctatgttaatgaagcatgatgtataaagatgtggtttgtgaaattaccaacataaagaaattcataggaaactaaataataatagagattttgtatactattgaagttgtttcaatttactctaaattgttccaaattaagaatgttaattgtaaatccccatggtaaccactaagttaatatcttttgaaaatacagaaaaggaaagcagagggtaaacacagtgatatgctacaaaatagcaactaaacacaaaagaaggcgataattgaggaaattaggaacaaaggaggtataagacatacagaaaacaaaagcaaaatggtaggagtaagcccctctttatcagtaattacattaaatacaaatgaattaaactctccaatccaaagaaagagattgacagaatggatttttaaaaaatgatccaactatattgtccacaagatactcactttagatcaaaatacacaatgcgttgaaatgaaaggatgggagaaaatattccatgtaagtaataaccaaaggagatctgaggcaaatatacttatatcagacaaaatagactttaagtcaaaaactgttacaaaatacaaagaacagtatatattgatttcaaaattaaacaagaagatataacaattataaatatatgtacaccaactaacagggctccaaaatatataatgtaaccattgagagaattaaagggagagacagacaattccacgaaaattgttgggcattttaaaacccaactttaataaaggacaaaacatccagagcaaatatcaagggaggaattagaggatttgaataaaactataagcaataactatagataacacttctctcaaaaactgcagaatacacattcttctcaagtgaacatggaacattctccagcacagatgatatgttaggccataagataagctcaataaacttaaaaagattgaaatcatgcaaagtatcttcactgaccacaatggaatgaaataagatatcaataacaaaagaaaaactagaaaatttacaaatatttggaaattaaacaacacagtatttaccaaccaatgaatcaaagaacaaatcatgagggaaattagaaaatgtttagagacgattgaaaacaaagatataacaagatgggtgtgatatatcaaaagcagtgctcagagttgtaacacctacattttaaaaaagaaacatgtcaaatcaataaccaaactttactcaataaaccataaaaggaagagcaaacaaaatccagagctagcagaaggaaggaaataaagattagagcagagataaatgaaattgagaattaaaaaattatacagagatcaacaaaactaaaagttggttcttttaaaatatcaataaaattaatatacttttacatagactaagcaaaacatctctattcagctgacttttttttacaagggagccaacattattcagtggggaataatagctttttcaacaaaaagtgctgggaatactgaatattcatatgaaaaaaaaatgaagctggacccctacctcacattatatacaaaatctagattggatcaataatgtaaatatacgagtgaaaaccatacatgcttagaagaaaacatggaaataaaacattgctgtggattggcaatgcattcttagataatacaccaaaaatacaagcatgaaacaaacaaatgtagccaaaatgtaccagaatctgaaaacatgtattatctataaagaattagaggggaatttggtgaaagaaatatgggagaatgggatattgctctgtgaatgcttttgtgcataattgtacatttttaattaagttaatcttttacactctcaaagtgtgatattaagcaagcaaagataagttattacaagactctaaaaccgaatgcaatgagaaacaagtgaatccaaatatatttcaaatgaatgaatgacataatcaaacttaaggggaaaataataattaatctgattaatttttgactgttctcttatttcaaattgacttttgaacatactttgactacatactattgcttgaaaaaataaaatatctgcaaaaaattattaaatcttcatgataggattttttctttttatattagtataaatataacaattctgaaacaaatgtatgtgcattgtaagattaagccaatgagtaaatattaatatatttgtattgctagaaccccagattctcactgtgaaaggacagagatacagatatggaataagacaaggaaagaagcagcccactgagttacattagaatcagtattatcaacataaatatgcaatgtgctctctcacatgctctttccttctcttaaaaaaatataatatgtacatattatatattatatgcatagacacacgtgtgtctatacatatcctatctatacatattgaggattaacaggtgctagtagaaaatattaactttctttgtattaacaggtgttagtagaaagtagtagtaggtgctaagataaaagccataattaaacctcctggtgaatgaacacaccatcacctacaatcttaccaaaaatagaaccaagcacgtgtcctagtcaaacctctggattcaactgtcatttggataaaacgcaaaggatagtgaaaatgtcgatcttcactgagagtctcaccagcaaatttcacagtgtggacatcaagtgacaaaaatcccacatttttcaacaaatatattgtatgggaaagaaaactttgaaaagaaacctgtatgttagaagggattttaaaaacacgacaaatgaaaacaaatgcgcaagactaaatcatagtgtcttggaatgcatgcatgaaggacacagccgtgaaaatgcaaggacgcctctactggaacagtcacgtttatcgtcacttttcaggagaaaggtggctgcaactgaggagagtcacatgcaggacttcagggctggcaaagtcctatatcttgacttatgtgatgattacagggatgtttacaaaaatcaaactataagtttgttttgtgccatgttttgtattgtgtgtgtgtgttttgtttttcaacttaaaaatacataaaatcaaaaccaaggcttcattatcaagtagcacaaagtctccaatctataacctcctttgtctggatatctgcatttaactaccattgccagagctaatcctgacaatgcattcatatttttaacactgaaacacagtaaacagggaaaattttgctcctctaaaacagggcatcttcaggcaatcagaacaactcagaaagtttctgtctgttgcataaaactcccctgtgcaaagagttacacaaaatgctgtcatagtaaaggtagttaactaacggcactaattgttcttgggcagtggccaagtggaacttcagagacctggcattgccagccagaaatcacttgtcatgggaattgtctcctggaatcactttggttgtcccagggtaacgcagggaaagtggttaatgggtcacttgggggtggcatcttcatcagtaaatcacatttactttctcctactaagaattttatttttggccatgaagccaaaagtcagctcttaaataacaagggaagcaaataatcattgaataaaaatagcagaaagaaaaagctgtgcaaagaaatttatgtttttaatttgttatatatgtatatttttatcatactttaagttctagggtacatgtgcacaatgtgcaggaataaaatttatgtttttaaaatttattctacattatgaattctacattagaaaaataaaccatagcctcatcacaggcacttaaatacactgaagctgccaaaacaatctatcgttttgcctacgtacttatcaacttcctcatagcaaactgggagaaaaaagcaatggaatgaataaaatgatagccacaaaaatcaaggtgggagaaatacttattatatgtccataaaaaattttaattaatgcaaagtattaacaccaatgattgcagtaatacagatcttacaaatgatagttttagtctgaacaggactatccaaaagttaattttctatagtaacagtttttaaataaaatatcaattcctgaaacacataaaatggtccatgagtatacaacgagtgaaaaaaaacaaattcagagcaaagataaattaagaagtatctaatattcaaacatagtcaaagagagggagatttctggataatcacttaagcccatggttaaacataaatgcaaatatgttaatgtttactgaataacttatctgtgccaagtggtgtattaatgattcatttttatttttcactaaatcttttctctaaagttggtgtagcctgcaactaaatgcaagaaatctgacctaggacctgcacttcttaccattttgctcatatttattccctgtgcatttttgtaacatgtatatgttatatatatagaaagagagagaggcagagatggaaagtaatttatggagtttgatgttatgtcagggtaattacatgattatataattaacaggtttctttttaaatcagctatatcaatagaaaaataaatgtaggaatcaagagactcattctgtccatctgtgatagttccatcatgatactgcattgtcaagtcattgctccaaaaatatggtttagctcaacactgagtgactataggaaaccagaaaccaggctgggcgctaaagatgcaaagatgaatgagacatcatctctgccgtccaaaagcttactgtctagtgggagagttacacacgtaaggacagtaatctaataagagctaataagtgaaaactaagataaattaataatacaagattacagggaaggtttccaaagtcaatgaggcctcaaatgaatcttgaaagtgtgcaaggattaaccaaatgaagaaatgtgtaagtttttcaaacaaaaaggaacagcatgagcaaatgcaaggaggcctaaaataaagagatgtgtaaagaggtgtaagcagctttgtgctactgcctgataattagaagaatatcgggagtaacaagagctatagaagagagtcacaattatggaaaaatatttattaaattataagaaatttatagcataaggaatagtaggaccattaaatgttttaataaagatgatgcttctttttttaatatttatttttattatactttaagttctagggtacatgtgcacaacgtgcaggttacatatgtatacatgtgccgtgttggtgtgctgcacccattaactcatcatttacattaggtatgtctcctaatgctatccctcccccctccccccaccccacaacaggccgcggtgtgtgatattccccttcctgtgtccaagtgttctcattgttcaagtcccacctatgagtgaaaacatgcggtgtttggttttttgttcttgagatagatgatgctttaaattgaccactctagctgcattgtgggaggaaaaaaagattttaaaacaagactagaaacagaataattagaaaaatgcaactacaatgcagatgagtgattatcaaggtctgaactgaatagtggaaatagagataaggaggcaaattcaagatatgtgcgtgacagtaaaattaacatgacctagtgtttgattgactctgtaaagtgaaaggaaaggatgaataatcaacaaataatatttattctaccaaatgcctccatgccgctttgatgacaggataatatgtaagcttttctatatttcagaaactatatgacatgacgaaaagtaaaaaggggatgggggtaaggaggtatcctgaattgactgagaaataaggaggtattccacagagaatataaataaacatatacttagtgttcaaggaataataaaaaagagaacatctatgtgtccaccatacaggatatgaaatagaacatttgccggccatggtggctcacacctgtaatcccagtactttgggaggccgaggtgggaggatcacttaagcccaggacacaggttgcagtgagccaagatcacactatcgtactccagcctgggccaccatgtctcagaaaaataaaaaaaactagatgtcttggaggattggaaacaaaatagaactttactagtgccttagacgcccattgggtgctccttgccaattgtgttctcctttatttcctgctggatatgaccactgtccttccattgcattgtatgtgttttttaatagactttaatggttctcaagtgatgcattatttagtttggttctttgaaacttatataaatgaaattattttgtagaagttctttcacctttatcagaaggtactttcaccttgattcaataataagtttgcatattacaaccttgttgaatgttggtgtaattcatccattcgtattgctatatgatattccactacatgaatatgtcggacttcattcctcagatctattgttgatgaacacttgaaatttttccagtttttaaccattacaaacaatgctgctatgaacattcttttgtaaatcacctggttcatatgtgcaagatatcctctggggtatatatttaaaagtaaaattattgagttattcaacattaccatgagatgctacactattttttttaacaatcctaccaatttacacttctaccacgaacagataagcattaccgttggtcttcatttgtaggaaccatatttgtcttttgctctgggggctttgttttgttttgctttgttttttgcttagaagtgctttggctattagggatctttttttggctccatgtgaactttaggatttttttttaattttgtgagaaataacgttggtaatttgatgggaattgcattaactctatagattgtatgggtgatatggtcactttagctattgatttttctaatccatgagcatgggatgtttttccatttgtttatgtcatctataatttctttcattagtattttgtagttctctttgtagagatctttcatttatatagttatgcattcctaggtatttttcatggctattgtaaattcagttgagttcttaatttggttctcaacaaattaatctcaacaaacattcaaacagcttgaatgtatttggtgtatagaaatacaactgatttttgtggcttgtttatcccaagactttactgaagtcgtgtatcaagtctaggagtcttctgaagactttagggttttctaggcctacagtcatgtcatcagtgagcagagatcatttgacttcttttctaatttgtataccttttatttctttctcctttctgatagttctggctagcacttccagtactgtattgaataggaatgaagaaggtgaacatccttgcttttttccagtttctagaagcaacacttctaacttttgcccatccaggatgatgttggctgtggctttgtcatagatgactcattttttgaggtatactccatctatacctatattgttgagggtttttatcataaacagatgttggattttatcaaatgcttattctgcatctaatgagatgatcatagggtttttgttctcagttccatttatgtggtgaatcatgtttattgatttgtctattttgaaccattcaagcacccctggaataaagcccgcttgatcatgatgaattatctttttgatgtgttgttagcttcagtttgctagaattttgttgagtatttttacatctgtgttgatcagggataaggatttgtagttttcttttgtgttctttttaaaattttccttgttaattttactgcacagtattattttaatgatgaataaagtgttgagctggacatgtgtaccttgttcctcgtgttagaatgaaactgtttaatatgtcatgattatttataatgttgagagtagtttttgtgtatatattaagatatttacatcagttctcttctattcctagtttgttattattacaaatagtttcaaatgtgaacaagtgcttttcccacagctattgaaataaccatatttttttcttttattcagttaatgtggttaatttcattgtttggttttctaattttaaaccatacattcttgaaattactgcacttagtcacgatgtatttttctttggagtatattgttggattatatttgcaaacatttttgtttagaattattatgtagtatattagtctgtaatttcatttcttttaatatccttgtatggttttactatcatggaggtaccaccatataaaacaagttggaaagtgttatgtcttcccaattctctaaaaatattcatgtaacattggcattatttctttattaaatatttggtaatatttctttattaaatattgcatccacctagccctggagttctttctacaggaaaaaaaaattttctaaataaaatttctacaatgaaaaaaaaactactcagtttttctagtttttttctgatcatttcataaaagtaggtatttttcataggaacttgaccattccttatgattgtcaaatttattaatataaagtttcatattttatatttattttatcagataaataaaattatatgttttgaaatatatattcattgtaaaatagccatgttaagctaacatatgcattaccttacatgcttatctttttttatgagaacacttaaaaatctactcttagcaattttgaagaatacaagtacatcccctatggagaacagtttgaaggctcctcaaaaaagtaaaaatagagctaccatgtggtccagcaatcccactgctgcatatataccccccaaaaaagaaatcagtatatcgaagagatatctgcactcccgtatttgttgcagcactattttcaatagcgaagttatggagtcaacctaagtgtccatcaacagatgaatgaataaagaaaatgtggtacttatatacaatgaagtattattcagccataaaaaggaatgagaccctgtcatttgcaacaacatagatgaaactggaggtcattatgttaagtgaaataagccaggcacaaaaagacaaatactatgtgttatcacttatatgtggaatccaaaaagcaaacaactgaactcatggagatagagagtagaaggaagtataccagaggctgtgaagggtagtgggggttgggagaggtgggggatggttaatgggtacaaaaaaagaaagatttaataagacctagtatttgatagcacaacagggggattgcagtctaaaattcaattatacatttaaaaataactgaaagagtataattggattgtttataacacaaataataaatgcttgaggggatgaatatccaattttccattatgtacttattgtacattgcatgcctgtaccaaaatatttcatgtaccccataaatgtgtacacctgctatgtacccacaaaaattaaatttaaaaacaatacattgttatccactatagtcaccatattgcacaatagatctgttgaattcattcctcctgtacaatgcaattttgtaccctttgaccaacatctacccaatcctcctggtaaccatcattctactctgtacttctatgtgttcagccttcttagacctccacatacaagtgagattatgcagtatctggctttctgtgcctggattattttactcagtataatgtcctcccggttcattcatgttgtcacaaatgatactttttttattttttaaggttgtatactattctattgtgtatgtgtgccacattttcttcatccactcatgtgtcgatggatacttaagttaattccacatcttggctgttgtgaataatgctacaataaatatgggagtacagataactcattgacacactgatttgatatctttttaatatatgcccagaaatagcattactgaatcatatggtaattctatttttacagaatcatttatactgtcttttacaatggctgaaatagtttacattctcaacaattacaaggttttccttttctccacatcctctccaacacttggtatcttctgccttttctgtaacagccattctaacggatgtgaaatggcattttattgtagttttaatatgcatttctctgatgatcagtgataattagcatttttatatatctgttggccatttgtatgtcttcttttgagaaatgtctatttagatcctttgtcaatttttcattagggttccttgttttcttattattgtgttgtttgagttcctaagatattttggacattagcctcttatcaaatgtatagtttgcagataatttctcccattttgtaggttatcacttcactctgttgactttcttttgctgtgcagaagctttttaggttgatgctattccatttgtgttttgttgcttttcttgcctgtgctttagagtcatatcataaaatattattgcccagaccaatgtcttggagttattcccctgttttcttctaggagttctatagtgctaggtcttacatttaagtctaacttattttgaatttatatttttatatggtatgaaataagggcctaagatcaatcttgtggacattcagttttctcaacaccattttttgaagagactgttctttccccatgtgtgttcctggcacctttgttgaaagtcaattgactataatatgtagatttatttatgggctctttattctgtgtaattggtctatgtgtctgcgtttatgccagtaccatggtgtttcgattgctatagctatgtagtataatttgaagtcaggtaatgtgatatctcctgccttgcttttttcgatcaagattattttggcttttcagagttttttgtgattccatacagatttgagagttgtttttctatttctgtgggaaaatgtcataggaattttgatagagattgcattcaatatgtacatcactttggatagtatggacatttcaaacatattactttttccaatccatgaacatgagatatctttccatttatttgtggcttcttcaattgttttcatcaatgttttgtagttttcagtgtaaagatcattcacctctttgtttaaatttacatctaagtattttttgttgctattataaataggattgttttcttgatttctttttttgtatagtttgttgttgatgtgtagaaatgctaccgaattttgtatgttcacattgtatcctgcaactttactaaattcatttatgaattctaaattttttggcagagttattggtgttttctgtatataagatcatgtcaactgcaaacagaaacaatttaacttcttcctttccaattttcatgccttttatttctttcttttgcctaattgctctggctaggacatccagtactatgttgaatagaagttctgagagtgggcacccttgtatgaagttttccacaacatctcttatctttttattagctatatattaatacggatgtttcttcttcatcaggagtttgaaaaatatgtcttttctctatattgttcttaatcagtcttcctagaagtatttcaatttcaaaaagtagcaacaactgtgggagttcagtcaggctggtgggaaaaattttaaagatagttataagaaatcgacacaaaccttcatggaaggctgggggtgttgtatagcttcagtaatagatctgaatgaaggcggcctaatccttccttgagtaaatagcttaaagtaggtgcaaaggaatgtaagggagtttatctaaataacttgtttactcatgtggtcctgaagccaacctttgatcattcacaggcaggatggctctctctcgggggagggtgaccaggttaattaccctctatttgtgttgactaaaagcccctgtcatttaatgttttttcaataaatgctggcagggctagctagtcagggctcgtggctgccagaactctttctgtgcatggcccagccccctagcggctctttcactgaataattggtgtctgagtacattattcatccctcgtgcagctggggtctgcaggacagacccccacaaacaacaatttgcaaaagcaaacttccctgttttgtttttttcccaagatgataaattagaggcttttagtgtgcctcggccacttagaaatagcaagagagtgcacaaaggtcaactctgtgagctctaagtcaagaaggaaaatgggaatccaccagaatcatgaaggacatcatagatcccaagaaggagaatgtgagcaaacagtcaacatgacagcaaccagcttataaaagtgagcgaagtcctagtatgtgagagaggcagagagcctccctctgtaactgacattttcactgtgaatctgagcaaccccagccaagttgttgcattttgtttctcccaaggcctggagtcaacatggggagaggcttggagatgctgtgaagcaaagacactgggaacagctgcagacattttcccagaccaggaagtaagagcaagatgccattttcaatctggatgcatgcaaagtcagcttttttttttctttttgtgacccagcagaatgcctgcacaggcattttagtctcaggccaaagattggaacaactgctttggggcttggtagggaccttcacagccatattgtggaaaacacctcagcagtatgtgctggaattgtgctttcccccatcgcagcctcggggcaacagaaaagctgctacagctgtaatttctcccaggtgatgaaacttgcagccagggccagcttggagacctacaaccagtctgcaggtgtcattgctgggtgccccagcctgttcccctgagaatgtgatacagcagggctttctctgcttcacccccaggcagaaattcaggcattggagcacctgtctacctggaccagcatcctgagctaccccaccgtttataaacataggttgtggtgcagtggggccctctccagtctatggccaggcagatttccaggtatgtggagtacccacttgactggatcagcagcctgagcttccccaaccttcctgtgctgagattatagtgcagtgaggccctctcatctccacacataggcagacctccaagcaattagagcacctgctcctatggagaacttaaatttacaagaaaaaaaaaaaaccatcaaaaattggccaaaggacatgaacagacaattctcaaaagaagacatggatgtggccaacaaacatatgaaaaaaagctcaaatcactgatcattagagaaatgcaactcaaaaccacaatgagatactatctcaaaccagtcttaatggtgattatcaaaaactccagaaacaacagttgctggtaaggctgtggagaaataggaatgtttttacactgtttgtgggaatgtaaattagttcattcactgtggaaggcagtgtgaaaattcctcaaagatctagaaccagaaatgccatttgccccagcaatccctttactggatatatgcccaaaggaatataaatcattctattataaagatacatgcacagggctgggtgcagtggctcacacctgtaatcccagcactttgggaggccaaggcgggtggatcacctgaggacaggagtttgagaccagcctagccaacatggggaaactccatctctactaaaaatacaaaaattagccaggtatagtggtgcacacctgtaataccagctactttggaggctgaggcaggagaatcgctggaacccaggaggcagaggtcaaagtgagccaagatcataccattgcactccagcctgggcaacaagagcaaaactccatcttaaaaaaatatatatatatacatatacatacatatatatacacatatatatacatatatacagatattatatatgtaaatgtatatatatgtgtatatatatacacatatatatacatattataactacatatatatacacacacacatacatatacatgcacacatatgtttattgcagcactatttacgatagaaaatacatggaatcctcccaaatgcccatcaatgatatattggataaagaaaatgtgatatatattcaccatggaatactatgcagccgttaaaataaatgagatcatgttctttgcagggacatggatgaagctggaagccatcaccctcagcaaactaacacaggaaaagaaaaccaaacaccacatgttctcagtcgtaagagggagttgaacaatgagagcaaacacatggatacatggaggggaacaacacacaccagggcctctcagcgggacaggggtaggagaccatcaggacaaacacgtggatacatggaggggaacaacacacaccagggcctctcagggggacagggggtaggagaccatcaggacaaacacgtgggtacatggaggggaacaacacacaccagggcctctcagcgggacagggggtaggagaccatcaggacaaacacgtgggtacatggaggggaacaacacacaccagggcctctcagggggacagggggtaggagaccatcaggacaaacacgtgggtacatggaggggaacaacacacaccagggcctctcagggggacaggggtaggagaccatcaggacaaatagctaatgcatgcagggcctcatacctaggtgatgggttgatgggtgcagcaaaccaccatggcacacatttacctatgtatcaaacctatactttctgcacgtgtatcccagaacataaaataaaatttaaaaaatatatacactgattcatgatctcctttctctccttctgaaacactctttaaaactttttagcatttccccctctgtcttccatgtctcctaactacatgtttcttattttccatgtctttattcctgtgttcattttggatagccccttctgacctatattacagtttactagttcactcttcaactgcttctaacatactaatattctgttaaaaccattcatttgggtttaaatttcaattatgttattctctatggacattctatttgttttcttttaatcttcttggccattctctagagtttcctgttccattatgatatttttaattttttgttttactttaaacatactaaatatagttattttattttattttctgtatctgatactttcaataactgcagtctttgctagtcttttttctgtgctcttgctcatagtttttttcatttgttttcatgattagaaaaacagagagagaagaaggagagtaaagggaggaggcggaggaggagaaaagaagaaagcagagaagaagggacagagaaaaaaaggaagttggttctaacgtttctctaacaactggcttcagtgaaacactcccaccttgtggatttttaggttattgaaattaaccagtcttctgggtgcagcacaccaacatggcacatgtatacatatgtaacaaacctgcactttgtgcacatgtaccctaaaacttaaagtataataaaaaataaaataaaaagctacacaaatttaaaaaaaaagaaatcaacctaattcctagattaccacctcttgattcaaatgctttaaatctaggcttttcatctgagtctttctttttagttattctgtttatcttcaaaacactcctgctttgaatcattcaaaatctacctccctccctctgtttgactaccatcaatttttttgctcattcctaatgcattaatctattagctgtgaatatccaaaaaccctcatttcactgaatctttgacagacccctttgcatcctcttgttcttctaattatttcctcagaaactttatgttctcttttctttacaagcatgtcatagtttatatataatgtgtgtattgtttttatatatacctatatatagcctctttttaaaagcactatacaccatgctttgaaatatattctaaaatcaggtagcatgaaaatggaaacataacatactaaaacatatgggatgcaacaaaagcagttataagagggacatttatagcaataaatgcctacatcaaaaaagaaaaaaaagatctcaaataagcaacctaatattatgcctaaaggagcgagaaaattagagaacaatacaagcccaaagatagcagaaggaaacaaataacaaagatcagagcagaaataatataatagaaactgaaaatttcaataaaaataagaattgttttttgaaaagataaacaaaattaacaaattcttacatagactaagaaaaaagaaaacaaactcagaagtgaaagaagagacattacaactgataccacagaagttaaaaaatcataacatactactataaacaattattcaccagcaaattagataacctagaagaaattgataaactcgtaccaaaactgaatcatgaagaattcaaaatttagaagaaatcatgaataaggaaattaaatcaccaatgaaaggtctctcataaaagaaagaccaaggattgaatggcttggtggctgaattccaacaaacacttagatgactaacaccaatccttcccaaactcttccaaaaaaaatgaagaagaggaatactttcaaattcatttttcaaaaccagcattaccctgataccaaaaccagagaaggacactataataaaaataaattgcagaccaatactcctgatgaacttggatggaaaaaccttcagccaaatattagcaaatattatttttaaaaaaaaacagcaaaaaaattcaccagcttaagtgggattcatccctgggaagcttattagtcttatttgattcgtgtaatcagaaaatttctatgtctagtgaagagaaatgagagcaatagagactcatagcacctcaacaaatgtccaggcttgagccagttaacaaatacaagtccttcaaatacaaaaaagactgtgaaagaaaatagaacagatcaatgagactaagaatttgttctttgaaaagataaaactgacaaaccattagctagactagaaaaatgagagaatactcaaagcaataaaatcagaaatgaaagaggaaatattgcaactaataccacagaaatacagaggatcataagaggccactataaacaattacaagccaacaaattggataacctagaaaaagcagataaatttctagaaaaatgcaacttacctagagaaagtcaagaagaaagataaaatctgaacagaacaatactgagtatggagagtatatcaataataaaacatctcccatcaaagaacatcccaggaccagaaaacttcattgctgaattctaacattttaaaaaataataatacaatccttctgaaattcttccaaaaacttgaaggagaaagagtatttccaaactcattttaaaagatcagcattattgtttttttttaaagtgatgttccccttcctgtgtccatgtgttctcattgtccaattcccacctatgagtgagaacatgcggtgtttggttttttgtccttgtgattgtttgctgagaatgatggtttccagcttcacccatgtccctacaaaggacatgaactcatcattttttatggctgcatagtattccatggtgtatatgtgccacattttcttaatccagtctatcattgttggacatttggattggttccaagtctttgctattgtgaatagtgccacagtaaacatacgtgtgcatgtgtctttatagcagcatgatttatagtcctttgggtatatacccagtaatgggatggctgggtcaaatggtatttctagttctagatccctgcggaatcgccacactgtcttccacaatggttgaactagtttacagtcccaccaacagtgtaaaaatgttcctatttctccacatcctctccagcacctgttgtttcctgactttttaatgatggccattctaactggtgtaagatggtatctcattgtggttttgatttgcatttctctgatggccagtgatagtgagcattttttcatgtgttttttggctgcataaatgtcttcttttgagaagtgtctgttcatatcctttgcccactttttgatggggttgtttgtttttttcttgtaaatttgtttgggttcattgtagattccggatattagcactggggcctgttgtggggtggggggaggggggagggatagcattaggagatatacctaatgttaaatgatgagttaatgggtgcagcacaccagtatggcacatgtatacatatgtaactaacctgtacgttgtgcacatgtatcctaaaacttaaagtataatttaaaaaataaataaataaaaataaaaataaaaaggcaaacaaggacactataagaaaagtatgggccaaccaatatccctgatgaacacagatacaaaagtcctcaaaaaaaagtactagcaagcagaatttaacaacatattaggagaacatttaccatgataaagtggatttatcctccagatgtttcagcaaacacaaatcaaatgtgataaaccacattaacagaatgaaggataaaaaaatagctatctctatatatgcagaaaaagcatttgactaaattcaaaatcctctcatgactaaacctctcaacaaattgggcatagaaggcatgtaccttaacacaaaacaggacatatataacaagctcacagctcacatcatacccaacaatgaaaaagtgaaatcttttctgctaagatcaaaaacaagacaaggatatttattctcactacttctattcaacttatttctggaagtcctagccagagcaattaagccaaataaagaaataaaagattcaaattgaaaaggaagaagtaaaattgtctctgtttgatgacatattatatataggaaaccctaaaaactccaccaaaaagctattagaaatgataaatgaattcaataaaatttcagaattcaaaatcaatgtacaaaactcagtagtttctttacactcacaacaaactatatgacaaaaataaagaaatcaatctcattcacagtagcatcaaaaaaaacgtattttttttgtttaggagcacatttaggattgtacttaggagtacatttaaccaaggaggtgaaagatctgtattctgaacactataaaacattgatgaaaaattgtagatgacacaaatacatggaaagatattttatgttcatgggtaggaagaattaatattcttaaaatgtccttactgcccaaagcgatttataggtttaatgcaatatttatcaaaatttcaatgtcattcttcacagaaatagaaaaaacaatttgaaaatttatatggaaccacaaaggatcctgaataactaaaggactcttgagcaataagaacaaagctgaaggcctcacaatctgacttcaaaacatattacaggaaaagaacaaaagaaggaagaagagggtagaggagaagtgcagcaagggtggagggaggtgcccacgctgggtcggaggagcaggaggagtatggagggaagactcctgggtggcatggagctcttgcacctctaggcactgcccagccctgtgtcagccagggctgaacccccacaggataaggaagcctgtgtgtgtaccaacaatcaaagctacatctgtgacacaacaggacactgctatgggcagtctcagtgttgtaactactactatgaacattggtggttctggctggcgtggaccatcaccatcatcctgagctgctgctgtgtctgccaccacagccaagccagccctcaagtccagcagtagcaacatgaaatcaacctgactgcctatccagaagcccgcaattactcagtgctaccattttatttcaccaaactatttattaccttcttatgaggaagtggtgaactaacctccacctgtttccctccctgtctgtccattgtggatgagctctgagccctgttttcctgtgaagattctttgaattgcagccattctattcacatgaactctcacatctggagcacagatggccctctcaaggtaatttattgtatgcattgactgtttaccaaacaaatgtcttactatgtactcaggtatattcagcagcattgtcgactgcagtcccctatgcttgccagaagatactgtattcaaagtagaagtttcacagtgatgagtaatcactgcaattttcccattgctccatggactctcggaggccggtgttctgttccctgtaaatagagatgtactctgaacctttctgcctccctcagctgttcctagtccttggtatcagcccctggagatgtccacaaccacttaggacaaaaggcaaaagtggaatttcagacaaaactttgataggatcttcagtgataaacttggactaactgtggcccaggtatcagcactcccaagaattgccaggaggaagctttggcagacaccacaggtatggcaaggcctatctccctctgctgaatccaacaggggcaagcaagctggcatgtggcttgaggtgacccgaatatgtcagcacccctcagatgtctttctttgcacttttgaaaaaaatctcagaatttgctggcaacatggccaaataggaacagctccagtctgcagctcccagtgagatcaatgcagaatgcaggtgatttctgcatttccaactgaggtacctggttcatctcactgggactggttggacagtgggtgcagcccacggagggtgagccaaagcagaatggggcattgcctcacccaggaagtgcaaggggttgggggaattccctcccctagccaagggaagccccgagggactgtaccatgaggaacggtgcactccacccagaaactatgcttttctcatggtcttcacaatccacagaccaggagattccctccagtgcctctgccaccaaggccctaggtttcaagcacaaaactaggcagctgtttgggcagacaccgagctagctgcaggaggttttttttttttcatgccacagtggcaactggaatgccaacaagacagaaccattctctctcctggaaagggggctgaagccagggagccaagtggtctggctcggcaggtcccacccctacagagcccagcaagctaagatccactggcttgaaattcttgcacagcagtctgaggttgacctaggacactagagcttggtggggggaggggcttccacattgccaaggcttgagtaggcagttttacccccactgtgtaaacaaagccaccagaaagtttgaactgggtggagcccaccacaactcagcaaggccacagcagccagactgcctctctagatttctcctctctgggcaaggcatctctgaaaaaagggcagcagccccagtcagagacctatagataaaacccccatctccctggaacagagcacctaggggaaagggcggctgtgggcacagcttcagcagacttaaagcatctttgaaaagcctgatggctctgaagagagcagcagatctccctgcacagtattcgagctctgataagggtcagactgcctcctcaagtgggtccctgacccccgtgtatcctgactgggagacacctcccagtaggtgccaacaggcacctcatacaggagagctctggctggcatctggtgggtgcccctctgggacaaaacttccagaggaagaaacaggcagcaatcttggctgttctccagcctctgctggtgatacccaggcaaacagggtctagagtagacctagggcaaaccccaacagacctgcagcagaggggcctgactgttagaaggaaaactaacaaacaaaaaggaatagcatcaacatcaacaaaaaggacagccactcagtgaccccatcagaaggtcaccaacatcagaaaccacaggtagataaatccatgaagatggagagaaaccagagcaaaaaggctgaaaattccaaaaaccagaacgcctcttctcctccaaaggatcacaactcctcaccagcaagggaacaaaagaaaactggacagagaatgagtttgacgaattgagagaagtaggtttcagaaggtaggtaataacaaactcctccaagctaaaggagcatgtcctaacccaatgtaaggaagctaaggacctggaaaaaaggctagaccacttgctaactagaataaccagtttagagaagaacataaatgacctgatggagctgaaaaacacgccatgagaacttcatgcagcatgcacaaggatcaagcactgattcggtcaagcggaagaaagatatcagagactgaatatcaacttaatgaaataaatcaagaagacaagattagagaaaaaagaatgaaaagaaatgaacaaagcctccaagaaatatgggactatgtgaaacgaccaaatctacgtttgattgctgtacctgaaagtgatggggagaatggaaccaagttagaaaacactcttcgggatattatccaggagaacttccctaacctagcaaggcaggccaatattcaaattcagaaatatggagaacatcacaaagacactcctcaagaaaagcaaccccaagacacatagtcatcagattgagcaaggttgaaatgaaggaaaaaatgttaagggcagccagagagaaaggtcaggttacccacaaagggaagcccatcagactaacagcagatctatcagcagaaactctacaagccagaagagaatgggggccaatattcaacattcttaaagaaaagaattttccacccaggatttcatatccagccaaactaagcttcataagtgaaggagaaataaaatcctttacagacaagcaaatgctgagagattttgtcaccaccaggcctgccttaaaggagctcctgaaggaagcactaaacatggaaaggaacaactggtatcagccactgcaaaaacataccaaattgtaaagaccgttgacactatgaagaaactgcattaactaacagcaaaataaccagctagcatcgtaatgacaggatcaaattcacacataacaatatcaaccttaaatgtaaatgggctaaatgctccaattaaaaaacacagactggcaaattggctaaagagtcaagacccatcagtgttctgtattcaggagacccatctcacgtgcaaagacacaaataggctcaaaataaagggatggaggaatacttaccaagcaaatggaaggcaaaaaaaagcaggggttgcaatcctagtctctgataaaacagactttaaaccaacaaagatcaaaagagacaaataagggcattgcataatggtaaaaggatcaatgcaacaagaagagctaattatcctaaatatatatgcacccaacacaggagcacccagatgcataaagtaagctcttagagacttaaaaagagacttagaccctcacacaataatagtgggagactttaacaccccactgtcaatactagacagatcaacgaaacagaaagttaacaaggatatccaggacttgaactcagctctggaccaagtggatccaataggcagctacagaactctccaccccaaatcaacggaatatacattcttctcagcaccacattgcacttattctaaaattgaccacatatttggaagtaaaacactcctcagcaaatgcaaaaaaaaatgggaatcataacagtctctcagatcgcagtgcaattaaattagaactcaggattaagaaactgactcaaacccacacaactacatgtaaactgaacaacctgctcctgaacaactactgggtaaataaagatattaaggcagaaataaataagttatttgaaaccaatgagaacaaagacataacataccagaatctctggtacacaattatagcagtgtgtagagggaaatttatagcactaaatgcccacaagagaaagcaggaaagatctaaaattgacaccctaacatctcaattaaaagaactcaagaggcaggagcatacaaaaagctagcagaggacaataaataactaagatcagagcagaactgaaggagatagagacacaaaaaaaccttcaaaaaaaaatcaatgaatccaggagctggttttttgaaaatatcaataaaatagatagaccactagccagactcataaagaagaaaacagagaagaatcaaacagatgcaataaaaaatgataaaggagataccaccactgatcccacagaaatacaaactactatcagagaatactataaacacctctacacaaactagaaaatctagaagaaatggacaaattcctggacacatacgccctcccaagactaaaccaggaagaagttgaatccctgaatagaccaataacaaggtctgaaattgtggcagtaattaatagcctaccaaccaaaaaacagtccaggaccagatggattcacagccgaattctaccagaggtacaaagaggagttggtaccattccttctgaaactattccaaacaacagaaaaagagagaatcctccctaactcattttatgaggccagaataattctggtaccaaaatttggcagagacacacacaaaaaaaagaaaatttcaagccaatatccctgatgaacatcgatgcaaaaatcctcaataaaatactggcaaaccaaatccagcagcacatcaaaagcttgtccaccacaatcaagtcggcttcatccctgggatacaaggctagttcaacatacgcaaatcaataaacataattcatcatataaatagaaccaatggcaaaaaccacatgcttctctcaatagatgcagaaaaggccttcgacaaaattcagcagcccttcatgctaaaaactctcaataaactaggtactgatggaacatatctcaaaataataatacctatttatgaaaaacccacagccaatactgaatggtgaaaaactggaagcattccctttgaaaaccagcacaagacaaggatgccctatctcaccactcctattcaacgtagtattggaagttctggccagggcaatcaggcaagagaaagaaattgtctctgtttgcagatgacatgattgtgtatttagaaaaccccatggtctcagcccaaaatcttcttaagctaataagcaacttcagaaaagtctcaggatacaaaatcaatgtgcaaaaatcaagcattcctatatgcaaaaaacagacaaacagagagccaaatcatgagtgaactctcccattcacaattgctactatgagaataaaatacctaggaatccaacttacaagggatgtgaaggacctcttcaaggagaactacaaaccactgctcaaggaaataagagaggacacaaacaaatggaaaaacattccatgctcatggataggaagaatcaatatcatgaaaatggacatactgcccaaagtttttatagactcaatgctatccccatcaagctaccactgactttgttcacagaattggaaaaaactactttaaatttcatatggaaccaaaaatgagcccgcagagctaggacagtcctaagcaagtagaacaaatctggaggcatcacgctgtctgacttcaaactatactacaagccttcagtaaccaaaacagcatggtactggtaccaaaacagatatgtagaccaatggaacagaacagaggcctcagaaataacgccacacatctacaactatctgatctttgacaaacctgacaaaaacaagcaatggggaaacgattccctttttaataaatggtgttgggaaaactggctagccatatgcagaaaactgaaactggatcccttccttacaccttacacaaaaattagctcacgatgtattaaagacttaaacataagatctaaaaccataaaaaaccctagaagaaaacctaggcaataccattcagtacataggcatggacaaaaacttcatgactaaaacaccaaaagcaattgcaacaaaaaccaaaatagacaaatgggatctaattaaactaaagagcttctgcacagcaaaagaaactgtcatcagagtgaacaggcaacctacagaatgggtgaaaatttttgcaatctatccatctgacaaagggctaatatccagaatctacaaagaacttaaacaatttacaagaaaataacaaacaaacccatcagtgggtgaaggatatgaactgacatttctctaaagaagacatttatgcagccaacaaacatatgaaaaaaagctcatcatcactggtcatcagagaaatgcatatcaataccacaatgagataccatctcacgccagatagaatggcgatcattaaaaagtcaggaaacaacagatgctggaaaggatgtggagaaataagaatgcttttacactgttggtgggagtgtaaattagttcaaccattgtggaagacagtgtggtgattcctcaaggttctagaactagaaatatgatttgacccagcaatcgcattactgggtatatatccaaaggattataaatcattctaccataaagacacatgcatacatatgtttattgtggcactgttcacaatagcaaagacttggaaccaaccaaaatgcccattcaatgatagactgcataaagaaaatgtggcacatatacaccatggaatactatgcagccataaagaaggatgagttcatatccttttcagggacatggatgaagctggaaaccatcattctcagcaaactaatccaagaacagaaaaccaaacacccgatgttctcactcataaatgggagttgaacaatgagaacacatggacagagggaggggaacacaacacaccggggcctgtctgggggtaggggctaggggaaggttagcattgggttaaatacctaatgtagatgatgggttgatgggtgcagcaaaccaccatggcacgtgtatacctatgtaacaatcctgcatgttctgcacatgtaccccagaacttaaaatataatttaaaaaaaaatctcaaacaactcactgaagtgtctcaaagctgaacaagttttaccaaaatgaatccttctcagttaactgatcaaatggatgaatcctgaccctctgaagtctctttcctgagttagagcagggaactgctctgagtgttaactgttggattcactgcagtgtcctacaatattttacaagaagatgaaaaggcaacctgcagacctaggcttgattcccaagtcacagtctgacccctgctacaggaggttaccctcctcaggaagagatagaaatagggaatttgaaggaatagtgaggggaccagggagatttgattgagtctggtttccaggtgaattaaaaggaagggtgtcatccagggtttgttgctacagtcaaaagaataaataaatcaatgaagaaataccttcattgtctgtggttttcatgcagatatactcatggaggttgtatctctccaaaaacagacaaatccaaggctgtgaacaagcatccgcatttgaattccattaaaccaaaatctatgttgaacgaagtgaagtctgtacacagcattgcaaatgtgaacacattcctgtgtgaggcacatcaacatttgtcagttattgtgaatatgtgtatttttaagcaataagatgcagctggtcagttttctgggcaatcttggcgatgcatttcctgtgctgtggttgttctctaaccactgtgagaaacccaaataaaaatcgatccccccccaaaacaaatacgtatcacaaaaccatagtaatcaaaacaacatgacacttgcacaaaaacagacacattgaccaggggaacagaataaggagcccagaaataaactcatgcatttatgaccaataaatttttgacaaaggtgcccagaaaacgtaatgaagaatagacatttgtttcaataaatggtgttaagaaaactagatatccacatgcagaagaacacgaatgtgtatggtgtgtatccttatctcacaccatacacaaaaatcaattcaaaatggattaaaggtttaaacataaaactgtaaaactactagatgaaaacataggggaaaagttccacaatgttggtttggtcaaagatttcttggatataacccccaaagcacaggcaacaaaagcaaaaatatatgggattgcatcaaactaaaaagcttctgcacagcaaaggaaacaatatggtgaagagacaacctacaagttgtgagaaaatatttgcagagcatacatctgatgaaaggctaatctccaaatatataagggactcaactcaatatcaagaaaacaaataaccaagtcaaaaaatgggcaaggtcctaaatagacatttctcaaaaaaaatacaaatgactaacataaaaaaagtttgtcatcctaattatcagggaaatgcaaattaaaatgacagtgagatgccacttcatacctgttagaatggctactatcaaaatgataaaagataacaagtgttgaagaggatacagagaaaagggaaccctcgtacactgttggtggaaatgtaaattaatactattatgaaaaatagataaaagttactcaaaaaactaaaactagaattactatatgatccagcaatcccacttccttgtatatatccaaaggaatttaagtcaatatgctgaagagatatctccaggctcatgttcattgcagcattattcacaatacccaaatatgaaatcaacacaggtgtctatcaactgacaaatggatgaagaaaatgtagtgtatatatacaatggaatactactcagccttaataggaaggaaaacctgatatatgtgacaacatgaattaacccagaagatatcacgctaagtgaaataagccaggcacgaaaagacaaatatcacatgatctcactgatatgtggaatctgaaaaagttgaattcatagaagtagagaatggaatggtgattatcagaggctaggagttgggggtagacatggaaaaggtagatgttgataaaagggttcaaagtttcagttagacaaagtttcagtgaactattgcacagaatggtgactgtaataaataacaaggtattgtatgtttcaaaatgactaacagagtagattttaaatgttttcaccacaaaaaagatatgtatgtcaataagatagacctaatctttccacaatttaaacatgtatcaaaacattacattgtaccccatagatacaattattatttgtcaatttaaaatttttcactaatttatattgttattgttgcaccaactcctttccaccaggcagattctcataaagactattttctctcttacatgaagcatttcctacacacctcttaatcacggtagcattgacatcattccaccagattctatctccagtgttaaaataatcaagaacccagaaatctccaccagggggcaaccaatgcgtatcaaagtttcccactttcctttagatttacttatgggtaacttatgggaaaaaatacttaagtacttccctttttaaagaaaaaaattatatgaattctacaaaattatggcagaaaatttaagaagagcagatgcttcccaactcattctaaagggccagcattaccctgattctgaaatgaaaaagctttacaaaatccaagatccattcctgactaaagataaaagaaattttcagcaaactgtgaatacagaaaactttctcagcctgttaaagagtacctatgaaaaaaattatagctaacattatacttaatgatgaaatatttaatatatttcataacaggaacaagtcaaagatgtctgctctaactaattctactcagcattcaacaaaatgaatatagtgaattcatactagaattttaaaagcaaatgtctttattcactgacaacataatcatctataaagaaaatcctacataacctataaaaaactgatggaactaataagttttgcaagtttacaggatataatgtcaaacaaagatctattatgtgcccataagctaagaataaacaattgtaaattgaaataaaaatgtcacttaaaagggcatcagaaatataaaacttagagataaatataaagtacatatgcataaagtacctgttcaccaaaaactacaaaacattgctgaaagaaattaaatgggcataatatagatgtagagatgtgttgaatttatgactcattttgaacaaggaatatattcatcatatattcatcagataagaattatgttacaggtctaataacattcaaatcaatacataatgtctcatagttcctgaatctaaaatatcaaagaaagaaacataaagccatatcatgtttaacgagaagggcttattgtatcatttatgagatcttcttgtaaatcactagctgtttgcatactctctttattgctgccttcatctccttattcctgaatgtatagacaactggattcagaaaaggagtgagaactgcatcaaaaatagccagaaacttgtccatctgtgaattagggtgtggccatgtatacacaaacatgggtggaccaaagaacaaaaggaccgctgtgctgtgagctgaaagagtggaaagggccttggatgaaccacctgaggaatgtttccaaacagtaaacaggatgaagacgtaggagattagaagtatgaagaaagtacccacacagataaacccactgttaacagtgaccatgaactgcaatctgtaggtgtcggtacaggctagtctgagaagctgaggaaggtcacagtagaagctgtccaacacattagggccacagaagggtaaattaacaagaaatgccagttggaacagggagtgactgacaacaagggtccaggcaacagccagaaatgaaaggcacattcttgggctcataatggtcagatagtggaggggcttaatagggccacataactgtcaaaggccatggctatgagcagcaccatctccacaccaccaatgacgtggatgaagaagatttgagcgatgcagcctccaaaggagatgactttgcgctttctgaacaggtcataaatcatcttgggagaagtgacagagcaggctcctaagtcaatgaaggagagactgaccagtagaaagtacatgggggagtgtaagtgagggtcagtggtcacagaaaacacaatgaggatgtttccagtaatgcttgccacatagagcacagaggaaaacactaggaggaggagctggatctcccatgaatgagtgagtcccagaaacaaaaactcagataccactgagtgattctctccatccattggtccagccaactgggctgtggctaaaattatgagaactaagaaaatggggaggaaattgtgattatgaagataatatgtactaaaatcaatattgcaatgtcactatgaataaatagtatacagttattctgttcctcacatattaaaaacaaaaaatcaacataatattatcacaacatgtgagctgcaacctgatttaaacccatcatcaatactttcagtgtaatgtctgatctaaaattaacagattaggtaagaacaagattcctgactatccatgaaattcatcaggtgtttaaatgacctgcgatattaactattcctcatttccaacatattccatttgtacttatacatattcttataatttccttcccttcccagtttgcagccacaattctctgacagaaagtagacataagaggaaaacatgattaacagatggattatcacctgcagtaagaggtgcctgggacggacttagttgaggtaggctgtggattgagacagaatatagagactggggtatgtgaaatcggaaagcccacaactgtagcagaacagagtaagtggactttcacaagaaatagaatcaccaccattatctaccacattttctcctgctcactgctatttaagtgcctcagtttctatacaatctttcacaattacgaagccctaaatggcttcccatcctgcagtgatttcataaggagcctatgccacctgtcatgtaaggctttttccatgcctaataaatatgttttggagggatttcaccagagtttttgctaagatgcataaaatggccacagaggttgtgagaaatctctgcagtttctctttgtctatacacatgaaagtattgaagaccagcacttggattagttaagataatgttttaattcatcactgtctcctcctccccttggtaccagcttttatgttcattgcattccccacccttttaagtactcagtacctcctgcatggtaacctattctgatatttgatattatcatgcttaatttgactgaatccatttggatattttatctttaagaaatttgtagttttatacttttaatttatgataaaattagattaatatcaaacattaacaagtgacttttaggaaggtatatgagctttcttattgacttcaaactataaagtacaaactgtgacactagaaatttagtcctttaacacatgttgtatttatatgtgaagtggagggtgagcagaaaacagtgttatatttctctgtgtccagatggatactcacctcaatcattttcctatagtagaaagtagttcctgaaaacacttaatagagattattttagaagttgctgaggtacaaataaaactgctatgctgacatacttttttgcaccaacaactccagttcttctgacacaaaggaccatcttcctagtgccataatttatcttagaccccaaaactcacagaggcacacatcatatctctaatacttgctcaccaccactggcatgagtctctctctatcctcttctacgtgaagtgattatactgtcacctctggagctaactgtccacagtctcaagatgcacacttttacaaccagaagcctatggactgggtgagggagcagaaacagccacaggtactgcccatcagggtaatgtaagtcagcgtgcaaacaactgatcagatgaacatgaatagcaaggtgccgaggcactgggaagagggaccggaaaactctataactgttgaaaaagactcaagcccttgggaagggaaatgcctacgaaattatataaagaccattttatccaagttggtcatcattcagatgaaaaccatgaggcccagaaaagtaaactgagtttccagaattcacacaattgatagaataggaaccagaattcaggcctcttgcttcctattccagaaagacaaattgcaataataatcaaataatatgagcaatcatccagtaaaaataatctagtaaaaacagcaaaactcaaaagagtgatttttcctggttaagaccaaactaaccatagattgctatacatagtatctattataaatactgaattatatagcagcctgacaataaatacataaaatgtgtacacaaagattattgaacctgtacaatacagtagtaaatagtaactttatatttgcaaagtgactgatcattactatcagaatttgtacccattcttcatattttgttggtcatataaccagttactacaactgcaaaaacaacctaaggtcatgtttctgtgaagtccatccttttggtctttaaattttattattctcaaaggtcaattatgatctcaatcttttcttgtaattttactgacaattctccttcacactgatttgttctttctctaattcctgtaaatagaaagaaccaaaaaaagttgaaaaaacatgtattgtacatataacaaacaatcatatgtggtatacaatatatatcaaatgagtattaagataaacattcaaagagttttaaagaaaaaagtgttatagatattggagggcagaagagacgattgccattaagaacaggtggaggaggttatgccaaggacattgacctgaccctttaggaattagtgaaaattgaataggagaagaatgaggtatacaatgtgtgaaaaatacctaaattgatataacaggaggagaccttttcatatcaattatcattacttctgtgtatataaccatattagatacccacaaacgaatagaaagtggatagttcttgattgacaagtaagactaataatcccagatcatagtaaggtcttaacttcaagtcaataatctttattacttatggttcattcctctccctcatgttttccaataattttaaaatgcataattaaaacaattctcatttaaaaacatagtagccatgactaatgatcttccagtgggaaggtactaagactttacaacatgtttcttgctggggataagacagcctacagccagcattcaactcatttttctaaagtctatggatcaatttgaaatacagaaaaagtagaacagagataaagttaaaaaaagattaaaaatatgggaagaatgggagaaaggggagattagaagatatgaacaatgatttaaaaataaaagagcctcaaaggagaagagaaactgctaagcaagactaaggtaggatgaaatacagtagtctctgtttctgagaacacaggttaaaaagaacataaataaaataaatttatcacctttaatacactcattcaaggatgctactgagtttgactttgggaatttctcacctttaatacactcatctggggatgctacggactgtgacattgggttgcatttaacgggggagagaaagggcagttgcttctattatctgcccttttggactcacagagtttctttgaaaagcacagatgataataaatggaaatattgccttttatactatacaataatatacacatgcaattcactggaaaaagtatacttgttactatgatttgaggatactaccatatactaatcaagagaaacacatgtacagaacaaagaagccacatgaaatttttactagtgtgtgttttccttgtgttctaccaccccaggagcagcttctgctactgaagatcacagtagagttatttccaaaagttgtgggtctgcagggtggacttatcacatagctgtttgccaaaattcaaaagtccagaaaccatttccaaattttcacctcttttatcttcaaatcctaaaactatgaaaattcacaaacttagctccatacattatggtagaaaggttaataatttggactttgagtttgaccaggcctgatttttgaataaattcacaaacttacctccatacattatggtagaaaggtcaataatctggactttgaggtcgaccaggcctgatttttggatccaggctgcaacactcacttgctgtgttaacgtaacaaagttcctagaccatgctgagcttcagtttacttgttattgaattagggatatagcgttcaaaggaagaagttctagtatttgattgcacagcagagaaattatagttattgaactggggatatgtagatagacataataaattttagtattcaattatacaatggagaaatcatagggaacaataatttattatatattctaaaatagctagcagagaaaaattataatgttcccaacacaaagaaaagataaatattcgaggtgatgaatatccaaattactctgatttgatcattacacattgtatacatgtatcaaaaatatcacatgtaccccaaaacatgtacaactatgatacatcaataaaaaacaacaaaaaaaccaaaagaatagaaatcaaaaataaatacataaatacataaaatagggataataatacctcccttgcttgcttgctcccttgctccatttgtaagaaataagtgatataatataggtaaaaatacttaacctcatacctaccacacagtatagcacaataaacgttatttattataatctgaggcctacctacataagtgactttcaagtatagaaaattatttctcaaattttaaatactccctgattctcaggtatggtaattagacctggctttaggtaaagctctcatgtctacacttggatttaatcacttaagtatatttcccagtgccccccccaaaaaaaattgctcctaggtggacacactaatcaaagacttcctgagaaatgcaggaagaagttttgtcctctgaccacgctacaccctttccttgatggtaagccccataatctaaagccataagtttcaattcctcacataaaaagaaaaaaaatgtcttttatgaccacttcagataacactggatatttcccttgtcattaggaatgagaaatgggaggaaggtaaacttgtagacaggagaattggtagatgcttgaaaggatttctgaaaactgtgcctatccaggtgtacaaatgtgttgaccagccaaggcaaagcagtcaaaccatacaataccttatcctcaggaaaatggacttttctcccaaattgcctttttcatgaaaaatataaaattctccagtttcaacctcatgttaaatttcacatgtgaagaaaacagtcatgcacatcagaaaattaaatggcgagtcaagaccaaattcctagtcacagttatgttctgtttccagtattaccttctcacttattcattttgttaaagtggagccaaaatagaagtgggtgtcacacatcaagaaagactgaagtcgtacaaagccgatccttatccaacgtgcattaaaatatgcatcaggcatgtgtgatgcatatagtagaagtggaacaaatcaggccaggtgcagtggctcacgcctgtcagcccagcactttgggaggccaaagcaagcaaatcgcttgagatcagcagttcaagaagtgtaacaaatcctctacaatataagtagagtgaaaagagatagctacagtgatgagggaaggcactatagtgatgtggcatttgagtatagccataaaagaggataaatattacaatacatgaatatagggtctaaagaagtcttttcaagtagattgtaaaatatttcaaaaatggtaagtttggtgtatgttgaagcatacagattgtctacatcctaaaaatcattttggtgaataaaggaaaataagaaaggtagtcaatattcatttgttgcctatcattagaaacttctcaaaggtatatgagaattattaaataaatttaggaagccagtgaaggtatgggtcccgggaattgaggatgaagccagtaattagggaagatgccctatctataagtgtgatgtatcaaatggaggaaaagaaaaacggagggaaggagttcccttaagagaagattgaaatagagcagacttggggggctacacagaggaactggg[367 bp omitted]ctggtaagtaaaaacccaaaggattggtgacttatcacagctggagtgaatacgaaggagcatgaactcaaagaaaatatcaagatttaagcaagaataaataggacaatggtaggtccatttttagaaattagaaagttgaacataaaatatgtcagggtggagaaaataatcacgtgtattttaagcaaataagagtattagatattgagatgctcaggtgaaaacatatgacaggatatatgggggaaaagtacaaattcaacatgtaattgtatagtaatccatataaaaataatagacggatgtgtaagagtgcataaggtccctgaaggaaataatacacaggaaaaaaagattaaaaagcaaagacccaactatagaaactatccacattgattatgtaaagtaggaaaaggaatcaataaactagacagaacatcacagaggtaggaggacaagtgctggcctcaaggagccaacacagaagcaggtatcaagaataaaggaggagaagagagaacaaagagagagagaagagaacttctgtggcagaagatcaagtgggatggtagaataaaggagaagaaatacaagaaaattgaaataaaatttacagaaatgttctacattgtaagtgggcagttttgacctggcacattgttggcacacattataaatgtcaaatgtattaatgaatgaatgaatggataatataatgaatgtgatggagttgtcaaaagctgaattaattaaaagtccccacgagaggttagatgacaaaattttcagaaactttccatgccactctgttgtgacatcaacagtgctggacccttgaaatcaaaccaaaaggattccaccatgagaatgaaaagggctgagaaggggaatgctgggtgacacagaaggtgacaaagggcgaaaggtttctaggcatttgatagactgatggacgtccgcgctgaccataaggcacaggccacacaggaaggaaaatgagacccaacgcgaagaaaagtagggctaaacagtcgggaaaatgtgggaagaaggatgaatagtcatacgatcaactcagattcctccctgacattcttctacagctttattctcgtcctttgggagccgagatgttcattttcctacattcttagctgcctacacacggcgacttttctccacggtgcctgatccctgctgcatcctccttctctagtggcaacagcaaatggccacacagaaggcagacattgcacccaactgaggagaatgtaattcactcattgccagtcacagaccttggctcaccgatttactaagtatagattttatttctatccctcacctacctgttttgccaagggaactaagaaaagagcatcatcaaaaattcagataggtatagttctcacaagatgaaccagatccagtacggcatcactgcagacatacacacagagctgcataaaacaggaagagagctgctaatcacagccccagagggtagtggccaaagtgatgccttggagatccgagaatgccagactgagatcacacggcctggggaattaccgcctatggtcattttggttttcccgggatagccatgttaattgggtgaaataaagcatatttgattttcttatgacaaaaaagggcttttgccattgtctacagatgatactttaaatctttattttatgactaaaggtgaattccagagcaacattaaatgttgtccctttaaatttttaatcatttgcataacgattaccataatattcaatttaaacataaaatgtaattgaaagtatgagattaatatgtggacatgaaatcatataatgttccatggaaaaaatagaatgtataaggcaaagaggtttaaagtaacatcaaaactaacgctcactatacaaattctatgaaatcctcataattacactgtgaagcaggtgttgttagagccacataatctcaaacaaattatttattatctaaaattacatagatattaaaaggttaggccatatatgaatttaggattctctcaaaaattttttctctttctcctacatcaaacttccctaaattatagaaaagtcacaatgttaccaaacatattcacaaaacacatataatcttgaatccaaatttcagttacagcagaaaaaataaaactctagatcaatctcaatcgtgtaaataaattcagatttccaatctaagagtctcaatttgacatacttctttctctctcttctttcaaaccaggagaaatataaatatgagccacaaccttacaaaagctagaaaatatttacaattccacacaacaacacatgaagaaaaccttctggacatcaaaagtttaaaccagtcaagactgaacaccaagataaagtgcatgcctctgaagagcttgagctagtcaagaagcccagaaatccctaaaagaggtgtgtatactgaggactgaggatcaaaacctgtgatctttacttggaacagaaatattgcagcatgtgaaccctccacagagtgacagagggaaaggagtttaaagggaaacatgcaaatgtatcacctttggaataattaggacacgtgtgtggtgtaatgaaagaaggcaaaaagatggggaagaagccagacagatggcaattttcattctattatgaaaagaaaaggataagtcacaagtcacatgacgaaattaacaactatgaatccactctaagccatagtcaatcctatagcctaggagtcattctaacagatgagagtgttttggagacaagattccaaaactcgtctgccttccatcatacttactacccccagctcctcctccacaatatcctttcacaagtatctagaatattcaaagactaataatattatataattatttataataattgtattacaaaaataaaacttgatgacctttataaaaatactagaagaaaaagggaaaattacataaggtacagaacatacaaattataccatgaagcagtaaaaaacaggatcaaattttctatgttttttaaaaatatgccttctctaaaatgttttctctctgaaatgatatttagaagacataattgaaaataaatacaaaataaagtgataaaaaataatctggcaaaattcaggatgtaatgagtaaagacaaccatgaaagaaatgaagatcaataaaagcaggaaaaaaagtgggaagtggagagaataatgctgctaaaaacacagataagaatataaatgacaggcttaaatatatcctgagcaaaacgaaatagaaaacacaagaaggtgaaatgtaacattaaagtcaggtccaacaaatgagaaattagtgtgaaagagctcacaatatctggttaaaaaattcaaagataaaagaaaacttttctgaaatgaagaaaacattgaatctaatggttaaagggcttatctttatccagaaaaaatgtgttatagtatgaccacatcaaggcagatgcaactgaatttaccggacttcacaaacacaaaataaacaacccacaaaaaaaaaaaaaaaaaatagagtccccatgaggctttaatgaagacaactattagaggccaggcgcaggggctaacacctacagtcccaacactttgaaaggccaaggcaggagaatcacttgagcccaggagttcaagataagaccagcctgggcaacatagcaagaccccatctctatcagaaaaacttaaaaaagaaaactatccactaaaaatgaatagagataacatgatacaagtgagcattctgaagcctaatatcaaaatgttctggggtttgcggttaaagaacagaatgcaaatgttacaaaccataactgtataaagactaattatattcataacaaaaataagaagagaaagatagtagaaatatattctggtccattcaactttcacagtgggagagaatcaacaaattatgttatgggtgattaaatattattttaaaagataaaggtcattattagaaaaattaaaaataacaaaatcaaataaagttgaatgacgaaggtgggagaggaaagtgggtttaaggggtaaagtggaactatattaaaagagtcaatggagagcacccttggaaataacacaaaaattaaagaactaaatataatttatacagcacataactaaactataaatcttcaaattaaaagaaaataggtacatacaaaatatcacatagagagatattaataccatgaaaatattaaaataaaagcataaaattaattcatttatttaccctattagtattttttgaacacctatgtgccaggtattgtgctgaatgccagtaagatatagttcctgcatcttggagttttcgtggaggagacagagattaatcaaacaatcacacaaatgtaaaattgcaaccataaaaattactctgaaatacaatgaaaattactataagagagggatttgatgtgagtcagagaagtttcccctaagaaagcaacactgaagctgagatctaaagggtaaacagcagttaactgagtggagaacaaaggttttcctgcagggggaacaatctgctccccgaggccagagtggggccttgggagttgtgcctgaaaccacattgtgaggaagtgaggggaagcattgtgcagataatgctgaaataagtagtggaagatgcttcctaagagaatgagaaatccaagactactaagcagaagaatgatttgaccagatttcacatttgtaaatatcactatggttacaatgtatagaatggattttaaggaattcaaattggatacaggtgagtcaattacaaagcaacatgcttgccaaggcaagaaatttgattacttaaactagatatgggagttttggaaataagtagataaatttgtcatatatttgagataataaatcaccatgacttgatggtagacttagttggagatgccctcactagtgcaccatctaatgcttcaagtctaataattattcaattcctccagagccaccaatccaatggttctaccatatttatgctgtcattcactttactgatatccttcttaccttacctcttttcccactttatattccatgatcaataccttgctccctcgtaatgattgtactcactcttccaaacaacaatcctgataaatcctactctctgccttctacatcttgataccacacagctatatgtggctagataaaacaatcacactgacaatcatcctatgctttctgaatccatcactcttctactttttcagatcttttctttctccctcatccttaccatgtaatgaactcattttgcatgtcaagggctaaaagttgaatattttaaaagttctcattttcccactactatataaaccaacaaatatctttagtctgcattcacaaataacataacaaatgagctcttcatatttctatctgtggtgaattaagatgactagaaattttgtggcaccatcctgttgaaaacgtggggacatattctttctccttgaacctgggtgggctctttgactgctttgaccaataaaatacagtgaaagtaaaacttccagttttgatgtccagatgttaaaagccttgaagcttccatttctacatcttggaaccaacgtgtgtggggtgctgagtcggtatcgaagaattctgcttattctgcttgcattagtccattttcatgctgctgataaagacatatccaagaccgggtaatttatgaataaaaagagtttcatggaatcacagttccatgtggatggggaggcctcacaatcatggcagaaggtgaaaagtatgcattacatgggagcagacaagagacaatgagagctgagtgaaaggggaagccccttgtaaagtcatcagctctcatgagacttattcacgaccataagaacagtatgggggagccaccccatcattcaattatctctcaccaggtccctccacaacacatgggaattatgggagctacaattcaagatgagatttgggaaaggacacagccaaaccacctcattctgcctctggcacctcccaaatctcatgtcctcacatttcaaaaccaatcatgccttcccaatagtccccaaaagtcttaactcacttcagcattaactcaaaagttggcagtccaaagtctcacctgagacagggcaagtctcttccacatataaacctgtaaaatcaaaagcaatttagttattttctagataagataggagtacaggcattgggtaaatgcagccgttccaaatggtaaaatttacccaaaacaaagggactaaaggctccaagcaagtccgaaatccagtgggacagtcaaatcttaaagctccaaaatgatctcctttgactctatgtctcacatccaggtcatactcatgcaagtggtgggttcccatggtctcaggcagctccacccctgtggttttgcaggggagagccttcctcccggttgctttcacaggctggcattgtatgcagcttttccaggcacacagtgcaagctgtcagtggatctaccattccggggtctggaggacagcagccctcttctcatagctccactaggcagtaccctagtggggactctgtgttgggggcttcaaccccacatttccattccccactgccttagcagaggttctccatgaagacctcacccctgcagcaaacttctgtctggagatccaggcatttccatacattctctgaaatctaggtggaggttcccatacctcgattctggacttccgtgaatccacaggctcaacaccacatggaagctgccaaagcttgaggcttgcaccctctgaagccatggcctgagctgtaccttgaccccttttagctgtggctggagcagctgggacacagagcaccaagtccctaggctgtacacaggcaaacagcagaggggccctgggcccagcctatgaaaccattttttcctcctaggcctctgggtgtgtgatggaaggggctgccacaaagatctctgacatggcctgaagacttagcgattaacatttggctccttgttacttatgcaaatttctgcagccagcttgaatttctcctcagaaaatggatttttcttttctatcacagtgtcatgctacaaattttctgaacgtttatgctctgttttcctgttaaaactgagtgcttttaacacacccaagtcactcttgaatgctttgctgcttagaaatttcttctgccagataccctaactcatctccctcaagttcaaagttccacaaatctctagggcagggacaaaatgctgccagtctctctcgatagcaagagacacctttactgcagttcccagtgagttcctcatctccatctgagaccatctcagcctggatttcattgtctatatcattatttgacattttagtcaaagccattcaacaagtctctaggaagttccaaactttcccacattttcctgtcgttttctgagccctccaaactgtttcaacccctgcctgttacccagttccaaagtcgcttccacatttttgggttatctttacaacagcaccccactctaccagtaccaatgtactgtattagtctgttttcatgctgctgataaagacatacctgagactgagtgatttatgaagaaaaagacacttaatggactcacatttccaggtggatggggaggcctcacaatcatggtggaaggcaaaaggcacatctctacatgatggcagacaagacagaatgagagctgagtgaaaggggaacccccttacaaaatcatcagctcttgtgagacttattcaagaccacgagaacagtatgggggaaatactcctgtgattcagttatctcccgttggatccctcccacaagacacggaaattatgggagctacaattcaagatgagatttgggtggggacacagccaaaccatattgctgctgaatagatcatgtagacaggctctcaaactacacggagagcaagagaggcccaccttaccacaacatttcatccaatccactaataaaacaggcacatcactgaaaccaccttcaactctccagactacccagctgccagctgaataccacagatggctacagttaataccacatggagcagaatcatgtagctaagccctgcttgcactaatacaagtccacaattttttttaagtttgttgttttaagctgcgaagttttgaggtggtttgtggtacgtggaataagatgtcactctaatataatataaacttaaactatgtggcattggctttggaatcagacaatggatagaagccagaaggatttcacaaagactgttagtgaaaagtgaacagacttcaaggaaaatgatagcaaaacctgtaaaagcattctgggaactgacagtaaacactgaatggtccttaaggagactgaaaacttgaaagagcttaagaagtctactggaaagggctttaaggataatgagaaaaaatcatcagtggaggctgaggaaaacgcaccaaagtcgtattctgatgggagagttagaaaacgcttgcctggaatgatataaaatataggaaaaataccgaaaaagtttgtggatctggctggggagatttttggtgtcaactaaagaaaaaaattaagcttttaagaaattaaagttagatttatttaggggtctgagaacaagagactgaggattacagcctaggagaagtctttcagagaggttctgtcagactgctctggtgaaggtctttagcccacagtttatatgcaggctgtacatatacaccatggaatactatgccgccattaaaaaatgatatcatgtcttttgctggaatgtggatggaccttctattatacttagcaaactaatgcaggaacagaaaaccaaatacagcatactctcagttataagtgggagctaaatgatgagaactaatgaacacaaagaataaaacagaccctggggtctacttgagggtggagggtgagaaaaggaagagaagcagaaaagataactattgggtactaggtttaatacctgggtgatgaaataatctgtacaataaccccctgtgacaccagtttacctatgtaacaaatgcccctaaacttaaaataaaagttaaaaaaaaagaaaattaaaatctccttatcatctacctggtaatatgaaaaacacaaatctttcattcattcctttcaactgatgaggaaaatgaggcatcgggagttagtaaaagtccacattgagatatgagacccacgactggctggacgcagtggctcacacctgtaatcccagcactttgggaggccgatgctggtggaacacctaaggtcaggagttcgggaccaggctggccaacatggtgaaacccccatctctactaaaaatacaaaaattagctgggtgtggtggcaggcacctgtaataccagctactagggaggctgaggcaggagaatcgcttgaacccaggaggtggagtttacagtgagccaaaatcacgccattgcactccagcctgggcaacaagagcaagactctgtcggggaaaaaaaaaaaaaaaaaaaccaccaccatcattttgcaagtgttaccactattgtgtgttaatattgtagaagtattcctaattatgatttctttgtattcctaattgtaatagctttgtatttgaaaaattattgattcatactctatgttattattttgtatgtgatgacaacagaatatattatcatgctccttttgtgaatctcattcataatataaagtataaatttgtgattttgctttaatttgaaatattaatttcaaatatgttatcacaatttgatacaaactattgacagtaaatctgtggattaagtaatgtcttagtaggtattgggaaaatttgaaactagtaacatggaggactattgtcattgtttatttcaaagccagttaaaattctgcaaagcagtgtacataaaaataatttcaagaaatttataaaataccgagattatggtgtataaacaactttagattctttgtttaagaaattctgccagtttgtaatatatgcttcattcaaagtagctaagggctgtacctggccaatagtaggcacctaatatttgttgaaaaggaatactgagtagctgggacctcctgagtagctgggaccacacacatttaacctgtatttataaaattactgtttagagaataacatttgatggaatcatgcttttactttctgcttatgactcaattgtttgtactgacattaacatcccaaatccttagcatggcctacaaggccctgagcaatgtggcacctgctgaagcctgctgcctcatttaataactctttgtctctttcccagatccagccactctaacattttttagctcctggaccaagacaagctcttcccagaacctgacctttgtacctgttctttattcctggagtatttttcccctgacaaattacttatcatctatcataattcaggttaaatggcactaactcagggaaggcttccctaactgcctcccttctccaaccaaattaggaacaattatatggccacatagtatcgaatcaagtttataattttaaaataattgggagattttgttgtttaacacttgttttcactataagactgtaattacatgcaagtaagaaccatgcctgtttgttcactcctgccacagtcagaatagtgcctggaatatgcagtaagggctgaacaaacactaaataaatgaacaagtgaataaatggatattgtctcatttttagaacagagtactgaagggatcatgaacactatctggtatgtcacgtaggtaatttacaagggctacaatttcagctcagatttaccttttcctggatacaggtcttgataggtctcttgatgtcatttcacttcagattcttctttagaaaacttggacaatagcatttgctgtcttgtccaaattgttactaagaatcaagagagatatctgacatgaaatgacattggaaaacattaaacacgattgaaataatgctagccaatatggttattattagaaaccaattacattttcaacttaaaaacagtaatacttattgcagactcaaatgtgcttattctaaaacaagtaaatgtttgcctatggtctgagattctaatccacggagttcattctaatccacattcaacactatcatgtaccagtgggcctcataacccacctagccctgtgatttttcaggttcacttttctaaacttgtgaattaaatatttattttcttagttcagaagaggaaaaaaactcttgtaattgttgcccatttcaggagaaatcttgcatatgaaaacaagagataaatatacacaactgaggactgtggtttaaacaaaatcttgagaatgttttttgaccttatacatttgtgctttagtataacaaaatgatatagacaaaggtaacttttaatagaaccagtcactaaattaaaaaaatgacaaattcttctgcttagctaagcaacagagaaggtaaaatactaattcaattcatcaatttaagcaatactcattaagagccaagtatgtgcttactgaataagctgctaaggtttggtggttacagagtgtgcggtgaaatgatgtctacatcacagtccaacattcacagagtttaaaagcctaccaagaatcaagacagacacaaatacctaacatagaagtttgtatatgataagagagccagagtacaatttaggagaagaaattgtatggaaggaaggttcatttccattagaccagaaaagacagcacatttgaaggcctgaataagaaatattctggataagatattgtggctgctaccagaatggctcttgatgatctctacctcttggtatttatacccttatataatctctttcctatagtgtaagctggtcccaggtacttgtttctattgaatagaatagaacaaaagaaatgagatgccacttctgagattagattataagatactgtgaatttcatcttgtgccctctccctctctctctttctcttgccctctcatttgaatgaagccaaccggcatgctgtcagtggcccagtgtaagtcctgttacaagaaattgatgattacctgtagccaaccctaagtgaagaactgaggtcctcagtcctacaaatggagagaaactgaatctagctaagaaccatgtgagtgagctgggaagaagatccaccctcagttgaaatttaagatgacatattgagcagacatactgagacacactgaaagtaagagagcaggaggaaacaaaaccagggtcatacaaagaacacaactgattttgagattctcacataagtattacaccttcagtgagcacgtgtactagaaatttaaaaaataaataaaataaaccttcaaagtgagctagcaaataaatttccctatggtctcagctctgagtggagagagaaaatgttccctgtggagtttatagccagaatccagctctcaaacaggtttcagcctgaactcacacaatctgtgtggcttccaaatttgcaagctgagaatttaattcaaagtggtctcaggttgatagcagtccaaaatgctaggtaggaaaaaaaatcctctctggacaaataaatcatcaaagcaagctcataagagcaggtttcaaaggtcatgagcttctaacacacacacaaaaatcacacacacaaaatgggggtagcagcaacatgggtagcgtattcaaacttgaaaagactttaaatatttgtattattagatgtagattatgaaacacatattttaatgtggttaatttttttaaggaatcaaaactatgagtaaagaccaagaaaattgtgctggatggccacttccaccatggctcccctcctatttaagtctgggtactgtgtcacccgaagtcttcaggcacattgttccaggtttgggtttgcctatgaaagaaactcatgagagctggaagtgaggagtgaagaggaggtcttcacataaagcaggcttaaggattagacatagcaggtttgacagatgtgatggcttgcagaatcctttatgagctcccactgtccatctggataagatttacagacctttcagaaattcctataagcttgggttctgtgcccactctctagactgtcaggctaagatctctgatataaaacagacctcttctgattttgtctagctgcttttctaatatctattcaccaagctcttccaataatagcataaggccctaattaatattaaacttttatcattataatacataggatgtcttctgttttcctgatcaaattctgactactattaaaatataaagaattgtccagaaatatataaaaaaagaatcacacattgatcttctttaaatgaaaatataacaattgtatggactaggatgattacagttgttcagttctgactgttatttgaagaaaaaagcaataagaagcctcagcaacttaacagaaggagctgccatttactaggagaaaagattgtggatgagagtgtagcaaaggtcagaattctgtgaagcttgagatgtttattataatgaattatcttttatactcactacaatttcctaacaattttggggtttatatttttgaaagagatatacctttaattttctttctttgtactattgttaggtaactttaatgtgcagattatactacagtgaaagttgccaatgacaaggcaaagtcacttacatcagacccaaagcaaagtggagccgggtcatgaaaaaggggatcttgtgtgtgtgtccacgataagcactatcacaaggactttctataaactcacaagaaatttctgcccacccagcacactctgtttgtccagctcatcctgtaggtgtctctataataggacctatcataaaaaattcctcaagactgcagcatttcagataagccaccctcacaagaacacttgcctagcaatggctgtttctgccagtaagttaacaccagctcctgcatcagaccctgtgaccaatgatgtttgtttcaaaacagcttgcatggacttctttttgtctttatatattttccttacctcaacctcttgggatgcacctatgattgatcatagcacaaatatctcagattataatccttgtttatttccaaataaatttatttctttggagatccactttttctgttattatacattgacattgttattatgaaattggttgggtgatgtgtcttattttcttgtctccagaagaatttctgtaacagtgcaattaaacgttctttgcatgtttgctagaactcacctgtaaaattgtctgagcaaccaaagcctggtttttgtgtttagtttttcttttgtgattggggaggggggtttatcgtactgattcaaggtgtgaaggtaacatcattttgattttatacatcttcttcagtccatttaagcatgttacatagcgttgtttgttcttttcatgatattctttacagtagtctcctaaatgttccctctgcttctgccaggagcccctacaatcaactcagaagctatagagtttaaaacatgtaacatattatgccacctttcttaccgtaaaacatcccatggtttctcatagtatttatagtaaaagtgaaatttttatgatggcttgagaaacttttcccattagatgcccaagtgctggtctggtctgatcttctcatcttcccttgggtgattctgtggcagtcacactagcctccttgctgctccacaaaaactccagcatgatcctacttcaggatatttgccattgttactgcatctgcctggaaccttttctcccatataaacatagagattgctcttgcctgtccttcaagtctattcttaaatgtcccattctctgtgaagctttcctgcccaccctatttaaattacagacttcactcccaattccccatctactttaagagtcttcatttatcattccttgacaaactgtaaatatacatgttcacttttttatcgtctgtctccaaatactggaatgttaagttctgtaatgtcagatatttctgtttggttcactggtgtattcttaaagcatgttacatactaggtatactcaatgaatatttgttgaataaatatcacattgggcttattccagaaattcaagcttgtttcaatagttagagcaatctacaaatgtaattcattacattaactaattaaaggagctaaatcacatcaccaccacaataatgcagaaaaccacatttgatacaactcaatattcatgtctgcctaacaaacatctcatgatactaggaaaagaggaagggatatattattttcatgtataaagcactaaccattgtagcatgccaatatactcaaaattcaatgaaattcctatcaaaattttagcattcctcttagtcctcaacaaagcatttctaaaatgtgtatagaagaccaaagggccaaaagagtcaacttctgaagaagcgcaaaaagaaagttgaggaaatcttaaaacatgttattgagcttaaagttgcaaaaataaactcatgtaccataattgatgagtagaaaaatagactagtggaataacataaaaataaaaacaatgcttacataaaatgttgtaactgatttggatgtcattagaaatcagtaagtaaatagatggacaatgtaatgaaagatgctaggcaaataatgtggtagggagaataatggccctcaaagatgcccatgcctaaccctggaacctgtgaatatgttacactgaatgcaataaaggcttatcagatgtgattaaggatgcaaaccgagatggagagatcttcctgggttacccagatgggcccagtctaatcacatgagttcttaaaaatggagaacctttcttagctgagtccagagagagatgtgacaatgaaagaatggtcagagaaatgtgacattgccagctttaaaaagagagaggagaggcaatgagaaaaggaatgctgatgttctctagaagatagaaaaggccaggatatggattctaccctagccgccataaagaaacatgcctgtcgacaacttgattttagttcactaaaattcatgcctgatttctgacttgtgtacactgtaagatgacaagtttgtgttattttaggtcacttagtttgtagaaatttgttacagcagtaatagaacaagtggttatccatatgaggcaaattagattggatacctatctccaatagaaatcaattcaaggtgaattccaggaaaatacttaaaacatttagattaaaaataaatgagaatttttgttactttttgtaggtcatagaaccaagaaaaacaaacattaaggaggaaaaatgaacatatgactacatcaaaatataaagcttctctatttggatgatatcataaggtgacaaatcataaactgtaatatttacaacatatatataagtgaataaatatacatttagaatatatatgaactcccaaaaatcaacaggaaaaataagacatagaacaagcaaaatgcataaacaaaagaaggcaaaacaaaaataatgactcataattatatgaaaagaagctcatcttcatagatgagcagataaatgcaaattaaaaccaccctgagatgctttttacatccatgagcctgataaaagttagagtctaaaagtaataattaacaaagatgggaagtaacagaaaatcttgtccattactggttaaagtataaactgatacagctactttatagaatattacattatagaataaagttgtgagtatgtatatgcagtgactcagcatattcattgctagtatgtactcaagagaaacttacaggagtggactaggaagtaaatacaaaatgattacaacattgtttgttatatcaaaaaataaaaaagacacccaattttccagcaaaaaaaataagtaaaaataaatcctggtgtattctaacaatggaataatatatagccattaaaataaatcaactattactgtacatatgaatgtaagtatcagcaaaacatattgtttagtgaaaaactaagaagctgaagaagaatatatacaatatggttacatttatatgaagtccaaaaacttgcaaaataaagaaatgtatttagaaatagattcacatgtgagaaaactagaagaaaattaatgaaaggataagagggatagcagtaattctgagtagttgagggaatttcaattggaaaaaaataatatcatattctttaagtcaggtagtgggtattagcatttgttttaccatcgttctttattcttatagctacactatatattttcaatgtatttaatgtattttttgcataattaaatattatgcaataaaaatgagaaaacaaaaaagtagaaaatgataaattacaataaagaaatggagaaaaaattataatctagttgagtaatggtatattacatagctattttcttaagtagatgtatgtacatgatgtatgcacgattgtacatacatgttcttaattatatataaatatatatgtacatatttttaatataaaatactaaacaaagtacaccaaaatattagctcctatgttagtgagataatgttttgtttttttgtattttaagttttacatagtaggtgtatttttctgttttcatactgctataaagaactgcccaagactgggtaatttataaaggaaagaagtttaattggctcacagttcagcacagcttgggaggcctcaggaaatctacaatcatggcggaagacaaagaggaagcaagccagcttcttcgcaaggcagcatgaagaagtgccgagcaaaggggaaagaatcccttataaaaccatcaaatctcgtgagaactcactatcgcaagaacagcacaggggaaactgcccccatgattcaattacctccacctggtctctcccttgacctgtggggattatgggggctatggggattacaattcaagacgagattcaggtggggatacaaagcctaaccatatcagtaggcatgtattgaattttaaactcagagaaaaatactagtgtttttataggattcttactaaagaaaaaccagaaagtaataaaccatctacgctaagacataaaattcagttgtttagttacaagatagaatgtggccttgtaagaaagcaaattaacttctaacatacaaagccttagagaagattcaagtgactgacggatcttaaacagagctattattacaactcgaactgcagtaaaatatcctcagcaacatagatgtgtgtgtttcactagtcagagcaatacaaatttaatgaaactccattggtggtgtttttaatcagacaatttctgaagatgtcctggcttattcacagatgcaagccaaatctctagaagagtaccataataagaaaaaaaagaatacaggcaattgagagctgttccaaagtttagggagtttttgtaaggaattaataaataaaaatgttcttgaaagagagaaattaatatgcagttcatactgccagaattgcaggcaatttatcaaagtcccctaatcctccaaaatcgctattttttttttgacacacactttacagtacagaagaaaatgtctccggcaataaatcacaaagttaaaattacctagtctacaattaactacacagtgatggtaaatcattttctaccaaaagaaagaaatgtcttgtctattcaggttctgctctacttaaaagttttccttgttggcgagcaagtggttagaaaatcatattttatacgtacattcagcttaactatcattcagctcaggaagatgactcagggccttatccataccttgaagtttgctcttagcaagtaattgtttcagtatctatatcaaaaatggcttaagcctgcaacatgtttctgaatgattaacaaggtgatagtcagttcttcattgaatcctggatgttttatttttcttaataagaggaattcatatggatcagctagaaaaaaattaagaggaaaatcacatggaaagttatatattatatatctattatatataatattatatatctattatatattatatattgtatatctattacatatataatattatatatgtattatatatattatatattatatatctattatatatattatatattatatatctattatatataatattatatattatatatctattataaatattatatattatatatctattatatataatattatatattatatatctattatatataatattatatattatatatctattatatataatattatatattatatatctattatatataatattatatattatatatctattatatataatattatatattatatatctattatatataatattatatattatatatctattatatataatattatatattatatatctattatatataatattatatattatatatctattatatataatattatatattatatatcatttccaaattccccagcgttcatatttgtcagtgcaagtaaagagccttactgctgatgaggtttgaggtatgaccatttggccagaatttatgaactctacatgtcgcttgatgtgtgcttcagggtacactttttttttttttttgagacggagtcttgctctgtcgcccaggctggagtgcagcggtgcgatctcagctcaccgcaagctccgtctcccgggttcacgccattctcctgcctgagcctcctgagtagctgggactacaggcgcccgccactatgccctgctaattttt[147 bp omitted]gacactactttgaaggtcataaaaaatataataagagataaggctaatttcctttaataataataaaatcctttaataaaaatataaaggaataatataataattttctttaataaaatataataagagataaggctaatttcctttaataaaatatagtaactacataccaacagaattccaaaaaaagaaatggagaggaagggagcatgggtcattaatcttgtcaaaaatataaaattatatacgaggaattcctagaaactgttttccttgtctgcggccattgtgctgctgctacacaactaccgcaagcagcccttcacgccctcctcccagtacaaagctaattgacttgtgagaaatgttaagcttggaagagtcagcatcgctgcacttattttttattctactctgacattagaataatccttgagtgggggaaaggttaaaaacccccctggataagtgttactaattaatgatgattgttttaaacaatgtttggataatttttccttgtcccttgacataaacttgataaataactgagaagtgagaaggagattagtgggttgattaaattccattcaggtacttaaagttagctccaaaaatttagctatttgtaaattgtcatgcattgttaatgtataagagatgtagatttcatttatctttggtggagcgagatgaagcagtgaatcattgaagactgaaagaaagaaaaaggtcttttcccttttctttaagaagcatcattagttaaaaacatgttagttgataccagagaactatatttaaagggacagcaataagcaaattgattactctggtgattattggagtgacattgccttttagttgtactttcacaaaaattcacaatatttgccaaagtcaagttatccattacactattaatttgtcattcttttgtttatatagtcaatatctctatctcaattggatctatctcaactgcttctaaacaagccaccatagtctctcccatttcaacaatctcttccaagtaccacttcatttcttcttttcatatttttgaaaacttttgaaaaactacctattttcctcctccatttcttgttcattccattctagtggacatggaatctgttcctcctccaaaacggaatttggtcacccttaaattactaaacccaaaacaatatgttgtctttatctttacctctctgtggcatttaatgataagaccactactttcttctcttttacccttctttcttgaattcagtcaaacaacgtacttacattttttgtcttattctccatcttagaaaccacctcagctttctccattcagctataaaattgtgcttttcctcaaagattaatctgcctctcctctcactctatactatctctgttagctaattttatttgtgcacattgcttatactgggcattatatacacatatgcatgtgtgtacatgtgcacacacacactgtatgtggacatgtatatatatatgtgtgtgtgtgtatatatagtatatatataaattacaataacataaaggtggcattttaaattagtggaaattaccctgatttgatcactacacattctatacatgtaaagaaaatatcactctgtatcccaagaatatgtacaattatggtttgtcaaatgaaaaagttcatacattgaaaaattttagataaatatcaaactttctctgaaactgtaactgtaaaatgtaaaaaacagtaagtgctatattgcttatttctgagtagaagaatatgagacatttccctaatcattatgtgtaattacaattacatatatatatgtaattgtaattacacataatgattagggaaatgtctcatattctatatatatagacagaaagagagaaaatatatgagggagagaaggaatctttccatctcctttgagttccacggtgttgagagtcaggacaactgcaattgcttcatcatgcctgcttgcaattatagggcttttgaaccatttgttccctccttagatatcctcatttttttcagattcttgcttagaagtcactcctccgtggacctcctctgacatattaaacattgcagtccattataagctgcaagaggacagggatttttgcctgttttattccctactgtatcaccaggggctacagcaatatctgacaaacagtgggcatgtaatgaatatttgttaagtgaagtaataaattcaatcaaatcacaccacctgtttaaagcacttcattggcttcacattgcacttagaataaagagaaattctttttatacaatataagttcctgcagaatgcagacactttctacttctccagcctcttttcgactcctctcctactagcttctgtatttaagccacattagacctttcttcagttttttatatagactttgtcgcatcacacctcagagattctgtacatgttcttcctcctgcctagaaaggatcgtccctccactttcgccaactaatccctgctcaacttttcatctcagcaggaggcccattctctttggcaatcctctggcctccagcccatttattatatgctcacatgtcaacatgtacttcgtacagcatgtaacacaattgcacttttatattttaacaaattatatttcccatattgaactgtaagtctcctgaaagcaggaattttgttcttgctcatcatcaactttttcaacatccagtgcaccatttagaacttagatgtagtcaatagaggtttgtggaatgaaagaggaaaagaaagaattaatattcctttaaattaggatggcaaagatcatatatagaaaattggctaagttgtggtccattcatgtttgctcccaattaaggagcacagctatgaaaaggaaggcttcaaattaataaccaatagatttttttaaaaagaaaactggccaggtactgtggcttatgtctgtaatatcagcatgttgggaggccaaggcaggattacttgagcccagaaattccagaccagcctgagaatttggcaaaactctgtctctacaaaaattacaaaaattagccaagtttggtggcatgtgcctgtagtaccagctacttgggaggctgaggtggaagaatagcttgagtctgggaggtcaaggctgcaatgagctgtgattgcaccactgcactcaagcctgggtggtagagtaagaccctgtctcaaaaaaaaaaaaaaaaaagaaaaatcactaagcaaaataagacatgtgaaggatcatgtcaaaggtaagaaaaattaggggaacattaaaagctttcttcccaagccactaaatcaacttgactaacaaaattaccacttgatttagcattagaaaattacattacatatcaaacataaacccattaatcaaatactaaagaaatttctgagttaaatggtataatgttagcttatgccagagctgaccttgaaagattgttcaaatatggctcagtgtgattgaaagttctgtgtgaatatgtttttggaaagatccaacagcaacaccttagtgtatgtttttgaaataaaatgtatctgagtagcagcaaagttattctcaaatttccattttatagctggagatgttataccgtgacgtatatgataggacccaatatggatcaatcccttttagaagtcaatcaggaagaggggagcagttaaaacagttgcttggtttacaaacattagaacaattttcttattcacaccatctgattattgtattttattttttccccaacgtttagactacacaatgagttaagaatgataaaaataagctcaccaatatactatgtacatatttaccaaaatctgtgcatgcttatacatataaacacagctgataatttattagttaggctcatttgtaatttttgtcactatagaccagttttttatttaaattgaagattagtatacattttaaatgattagtcaaaataaaaaatctaaaatgtgctctaaatacctcttaggtcagaaaaaaaaagtcaaaagctagagtatagagaaattaagaaacgccctaaatttctaatctgacaaaaattcatacaagatttaaatattttaatggaaaatagaacagaactaattattgaagaaattatagaaaggaaacaaaataaacagattatatggaggatttttagaagataagtaaataaattaatatactaggaaaaaacaagggaaatatacttgataaataaatacaggtaagagttcttttgaaataatgataaaatagaaaatctctgtcaaaactaaaaggaaagatgcataaatatataaataaatgataaaaaatgttgcatacatatatgactttttcagaatcaaaaaatttaaatttctgtaataaaatttaaatgtttataaatttaaaaaactagaagaaagaatgttgactgttcacaatacaaataaatgacaaatatttgaggtgatggatatgctaattatccttatttgatcattgggcattgtatacatgtatcaaaatatcactctgtatcccatgaatatgtacaattatttgtctcaaaaacaaacaaaaaaaagataatgggagaatgttgaaaactcagagagaagagcaactctcacagatagggatccagataacattagcagctgatttctcggcagaaaccttgaaggccagtaggcagtggattatatatttaaaataatgaagaaacctgtcaattgagaaatatatagctggaaaacttatccttcaaaaatgaaggagaaattaagacatttccggatttttttttaaaactgaaaaaaatccatttatccctgaatttgacattcaggaagtgttaagtccttcaggttgaaataaatgaactctaggcaataactatgtaagtaaataagcaagctgtatgaatatacaaagctctctggtaaaggtaaatacataaacaaacataaaaacagtcctattgtaattttggtttgtaactctgctttttattttctacataatttaaaaggcaaatgcataaaatgtaattgtaaatctgttagctggtatacaatgaataaagatataatttgtcacatcaataacataaaaagagtagagctatatatatagcagtagaattttggtatgtgattgaacttaagttgaaataaattcaaattaaaatgttataactctaggatgttatatgtaattctcatagtaaccaaaaatgaaatatatatagaatataaacaaaaggaaatgagactagaaacaaaatgtgtcactacaaaaaaatcaactaaagataaaaaagaaataattgagaaaatgattggcaaaaatcagtaactctgacgtattaaaactttccatgctacataaatctgaaaactctatttcacataaaactggagctgaaagaaacaaatatttacctataaagttaaaagttatatagggaacaaacactaatttttttttagaaaaaattataaaaagagtaaaaatatgccttatactaccgtaatttcatgttttacagctctgggaaaatagaaaataaaatgttctgttagcatgaatccctctgtgcccccaaaaaaccctatggattgcatcattattacctaaaaagtctattctcaaatgcagcagagtgatattttttacaaggtagatattaattttagatatggaataatattggtgatttcaattttataacactgggttaagatgaaagaatgagaagataaaggtccctcagcaatataactcacaaacatgttcagaagcagtaagaagttacattaattatcttttgaaagtcgataatctacatctttaatgtatgcatatagcatagctaatgtactatcgctgggtccatttattcaatgaataattgccgctatgtgtcagacatttttctaggcctaggaatggatacataagtgaacaaagcaaagattctggttcttgtagagtttccattaaaagacaatttagtaaaacttttcttcccccaaattataaaatctgtaagatggtttaacaacatgtgtaaaagtcattgtgggccaggcacggtggctcataccaggtgtggtgactcatagcactctgtcacccaggctggagtgcagtggcacaatctctgctcactgcaacctctgcctcctgggtacaagcgattctcctgcctcagctttctgagtagcaaggactacaggtgcacaccatcacgcctggctaatttttgtactattagtacagacggagtttcaccatgttggccaggctggtctcgaactcctgacctcaaatgatccatctacctcggcctcccaaagtgctggaattacagatgtgagccacaatgcccggccttattttctacaactttggtaactttagcatataccccaaatctgtaagacataatattataattcaaatgcaactcatggcttctcattgtactctttctctagcttttgaattatttattctaataccagttttaattctgacacaaaagcatgggagttctaatcaaaatccaaccttttatcataaaaactatgaagaaattatgagtagaatttaaaaaggaaaataggcctattaattagatttgtctttgtagcatttaactctataataaataatattttatgcctatgagtccccaacaaagcctccagcttctatttagatataaactgtaaaagtcactactggatccacaagcaagactatggtaaataaatttctccacctaaccagcttcttttacatgatgttacatgtttcttttgttttttcattttggcaaatattgattgtcatcttcgtgtttgtctatgtcctaagtgctgggatacagaatctgaaaagatggacacaggacctgccttcaagttcacccccttttttttttttttttgagatgcagttttgctcttgtcacccaggctggagtgtaatggtgagatctctgctcactgcaacctccacctccagggttcaagtgattctcctgcctcagcctcccaagtagctgggattacaggtcccagccaccacgcctagctaatttttgtatttttagtagagacagcgtttcatcatgttggtcaggctggtctcgaactcctaacctcaggtagtcgacccacctcggcctcccacagtgctgagattacaggcatgagccaccacgccctgctaggagttcacgctttagttggggaaaatatacaataagcaagccagtttttaaaatgagaactgcaattagagttaaatgctacaaagacaaactcacaggaagatgggatgtagaatgataaggctctcagaatagtaagagaaactattgcttcttacgatgtttgtctttctttgtatcggtgctcagctgagtctgcagtgcttcagaggcagctttcattttataaaaatctatgatttctccttccagttgttttttctcttcctcgagcttccttatctcctcctgttgaatcattttaagatgctcgaacttgtcctgcagctgtgaaaccaatgtgcagttgtgacaccaaagcagtgtggctgaacacctaaaagaatacgctttttttctgattatcaaacaaacccaaatcatcacagtagagcacgatcttaataacaatctcaaaaactcaggagtaaacactcagatatggaatttttcttttctttcttttttccttttataagatggagtctcactctgttgcccaggctggagtgcactggtgcgatctcagctcactgcaacctccatctcccagttcaagtgattctcctgcctcagcctcttgagtagctgggactataggcatgcatcaccactacaggcgtgtgccaccacacctggctaatttttgtatttttagtagagatggggttttgccatgatggccaggctggtctcgaactcctgacctcaggtgatcctcccgctttggcctcccaaagacttttttttttttttaatatagagacaagttctcagtacgttgcccaggatggtctcaaactcctgagctcaagtgatcctcccacctcagcttcccaaagtgctgggactgactggatgcagtggctcatgcttgtaaactcagcactttgggaggccaaggtgggaggatcgcttgagcccaggagttcaagaccagactgggtgatataacacaatagtcaacttcaacaggagagagaatctgtaaacttgaatatagatcttccgaaattatccagtcagaggacagagaaaaaaagaataaaagagagaaaagaaggctgggtgtggtggctcaagcctgtaatcccaacactttgggaggccgaggcaggcagattaagaggtcaggagttcaagaccagcctgtccaacatgacaaagccccatctctactaaaaatacaaaaattagccgggtgtggtggcacacacctgtagtcccagctacttgggaggctgaggcaggagaatcacttgaacccaggaggcggaggttggagtgcaatgtgagccgagaccacacattacactccagcctgggtgacagagcatgactctgtctcaaaaagaaaaaaaaaagagacagagaaaagaaagccaacaagacaccattaagcaaaccattgtcaggttatgggagtttgagaaggaaagtagagaaaggagaataaagcttatttaaagaatggctgacaactgcctaaatcatgggaaagatttagacatctaaatccatgaagcttaaagattcctaaagaggttcaaaccaaatagatactcaccaagtcacaatataatcaaatagtcaaaagttaaagaaactttgcaggtcaggacagaatcgaataatacattcaaagtgctgaaagaaaaaaactgccagcaactaatactatgtctgacaaagctgtccttcagaaaggaaaaagaaataatgtgtttcctcgacaaacaaagctgagggcattcaggaccactaggtctaccttaaaaaaatgcttaacggagtttttcaagtaaaaatgaatgaagttgggagcggtggctcatgcctgtaatcccattttgggaggctgaggtgggtggatcacctgaggtcgggaggtcaagaccagcctggccaacatggcaaaaccccacctccagtaaaaatacaaaaaattagccaggtatgaaggccactgagatcgtgccactgcactccagcctgggtgacaagagtcaaactacatttcaaaaacaaaaaacaaaacaaacaaaaaaaacaaaacttgaggcctggccttctgctcctctccaacctccccttctctgggcccaagccaccttggctgaggagggggcgaggaggtgtgagcccctgccaggaaccccctgcccggaccaagtgctcggcccccaggcctgcgttcagtgaggcctcccgtggcgtcagcatgttcgtgtggaggaatgtggaaggtcactctgcggccgtgttctcctggtactccatccccttcctgacccctccctgcagccacacgaggcccagcaacctgccagtcactcagtggcctccaaccagagaaaacaacctgccaagttggcagccgttgctcatgagcgtccaccaggtgggacagggagtgttgaccctgggcagccccctggagccacctgccctgaaagcccagggcccgcaaccccacacactttgggggtggtggaacctggtaaaagctcacctcccaccatggaggaggagccctgggcccctcaggggagtccctgctggacagtgagacagagaatgaccatgatgatgctttcctctccatcatgtctcctgacacccagttgcctctaccactcagatgatgtcaggcccagtccctcagtgccctgcgcaaggaacaggactcatcttctgagaaggatggacgcagccccaacaaatcagacaaggaccacatccggtggcccatgagtggcgctcatgatcttcagcaggcggcaccaggccctggcggggcgcaccagggtcatcccaaccaggataaccggaccgtcagccagatgctgagcgagcggtggtacaccctggggcccaatgagatgcagaaatacaacctggccttccaggtgaaggtggcccacttgcaacaaggaccgaaagaagtccagctcagaggccaagcccacaagccaggggctagcaggagtgtaacaagggctcgtgggagcggagcatatcagagacgggcactgccactgcccctggggtgtcctctgaactcctgtcagttgcagcccaaacactccagagctcggataccaaggagcagcttctgtggggcagaacggctgcacacagtcagggaacctggctcagcctggcccaagccttctcccacagcggggtacacagcctggacggcagggaaatagaccgtcaggcactacgggaactgacacaggtggtgtctggcactgcatcatactctggcccaaagccttctactcagcatggagctccaggccactttgcagcccctggtgagggaggtgacccgtgggcagccctgctgccgcccacgtgagctgctcattcccagcacatggccagcgaggtcatagcgagtgacgaagagcacacggtcatccatgaggaggagggggtgatgatgtcattgctgatgatggctttagcaccaccgacaccgatctcaagttcaaggagtgggtgaccgactgagagtggggacaactctggggaggagccagagggcaacaagggctttggtgggaaggtatttgcacctgtcattccttcctcctttactcctgccgccccttgctggatcctgagcccccagggtcccccgatccacctgcagcttttggcagtctatggtcacaccctgtcctcctcctacacatactcggatgcttcctcctcaaccttggcacccacctccttcttactgggcccaggagccttcaaagcccaggagtctggtcaacgcagcagagcgggccccctacggccccaacccctggggatgggggcccagggacgccttccaaggtggcctgtttcctcccaatggatcctgccaccttctggtgcaagagacctgaaagtgtgggcgacctggagctaccaggctcctcagtcatcagggtccctcccaatactaaggctttcctaggcaggagctgggctgagccacccggggggcagagcctgaagagaaactgactgggctttcggggtcggggcagagggaaccccacggacatggatcccacactggaggaccccaccgcgcccaaatgcaagatgagaagatgctccagctgcagtccaaagcccaacacccccaagtgtgccacgtgtgatggggacagcttcccctttgcctgtacaggtggagaagccgaggacaggctcagggaaccggagaccgagaaggcgctgtcctcttcactgcacgtaccctggaccagtgccggccctgatcatgcagctcttccaggcccactgcttcttcctgtccactaggccacagccgccctccaggcccactatgcacacatcttcccctccaaggtttgttctgcccctgccctgactcccagccctgtgggggtcctgaccgcacctcacctggctcagactcttgacgctgccctggctgccccaccactgcttctgcccgagagtcacgtgaggctgagagtaggggcaggggcagcagtggtgccagttggggggcggtccagtgggaggagcctcagcctcgcaggctgctccgtgggactgatgactgcatgatcttctgggcacctcacggatcttcaactgcaggtgaaacggatgctggtggtgggtgcagggccgctgggagctgctgcatggttcccagaggctggactgaggcaggtgccaactgaagctgctggggcagcatgggcaggatgttctgcacacaaaccttggagaagaagatgtgtgcatagcaggtccactgctgctgcccctgccctgactcccagccctgcctgaccccacctcaacctgctcaggctctggcacaaccctggctgccctgccactgcctctgccccagagttggggccttgacagcctggttggaaggggacaccccagccctgcctcaacacctgggggtctccataactagcacaggcaggtgggcaaccccaaagatcccaggactcacagtaccccctgagaacatggacagtatgtgggggtagcaatggagggcaggatggttatcttctcccaggtgaagccatttaatcctttcagtttgggacggagtaaggccttcctctttttttttttttttttttttttttttttgagaccgagtcttgctctgtcgcccaggctggagtgcagtggtgcgatcttggctcactgcaacctcttcccgccgggttcacgccattctcctgcctcagccttccgggtagctaggattacaggtagacgctaccacgtccggctaatttttgtatttttagtacagacggggcttcatcat[136 bp omitted]tgtgccgggggaaagctgggcagtttccctcctccgagcccctgtacataccatgaattgtgggaccttcagagcttttcacttttcggaaaatagctcctgctggggctacaagatggagtgtgaagagggccttgggccacagggaggcgcctgtggactagggggagttcatgcaccccttctttccccagaggggctggactcaggtgagtatgggggtgggggctcctgcacttcgacacaggcagtgggagggttttctccccattccctctgcactcccaacttgagctatactttttaagaaagtgattcaccctgcctttgcccccttccccagaacagaacacgttgatcgtgggcgacatttttcattgtgccaaaaagttgccatgaccgtcattaaacctgtttaacaccaaataataaggaaaataaaataaaaaactcgggcttgacgcagaaactcactccaaataaattacctaccaaaacatttacataatggtggaaatattccaaaattcaatattttgggatttatacacaaaagataaacaaattagaggccaagaggctgccggaagggaaaaacggggcctggaatggccgacgtgaggaatgagctgggcctaaagaggccactggcaggcaggagctggacctgccgaagtggccgaaaggcaggagctttggactggggaggccgcagtgaggcgagagctagctgggcgtggagagtccgctgtgaggccgaggccgaggccgggcccgtgcaggccttcgagaggcaggaggccgggcctgcaaaggccgactggagatcaagttctgcgcctgaagaggctgccaaaagtcaaaagcagggcctgcgaaggccgccgagagccatgagctgggctgggctgaaagaggccactgggaggcaggaggagctgggcctggagaggctgactcgaggaagttttgcacctggagaggccgtcgagaggacggagctgggcccagggaggccgacttgctgctcttccaggcccacttccaggccgacttgaggacgacttgggcctgcagaggccgccgggaggctggagctaagcctggagagactgacttcgggacgatttgggcctgcggaggccgccgggaggcccaagctgggcctagaggagcccaccgaccggaggccatttggggcctgcagatgtcatcggagggccaggagctgagcctggagaggccaccgcgaggcctgagctgggcctggggagcttggcttagggaagttgtgggcctaccagggccgctgggagctgggcaggagctgagtccaaagacgttgttgggacctggagtcgggccagagtccggcctggagatgcagccgggaggaagagctgggcccggagggggcgccgggaggctgcaagtgggtctgagaggccaacttgaggaggcctggcctctgcctcccgcattgcccagctgttcctcctggctgcatctcccacctcccagcaaacaagctcttttggctcagctcccgcctgcgtttgtagaccccgaagtttctgcaaccaagctcttcagacccacatcccttctcccagtgactgaacagtcccagctccggctggagaagggcgtctgcagaccccgctgttgcctcccaggggagtctccaggcccagctctcgccccaccgcgacctcccaggcccaagtccctgcctacctcccagcagcccgagtgcgatcctgttcctccctcacggtggcctgttgaggcagggggtcacgctgacctctgtccgcgtgggaggggccggtgtgaggcaagggctcacactgacctctctcagcgtgggaggggccggtgtgaggcaaggggctcacgctgacctctgtccgcgtgggaggggccggtgtgaggcaagggctcacactgacctctctcagcgtgggaggggccggggtgaggcaaggggctcacgctgacctctgtccgcgtgggaggggccggtgtgaggcaagggctcacactgacctctctcagcgtgggaggggccggggtgaggcaaggggctcacgctgacctctgtccgcgtgggaggggccggtgtgaggcaagggctcacactgacctctctcagcgtgggaggggccggtgtgaggcaaggggctcacgctgacctctgtccgcgtgggaggggccggtgtgaggcaagggctcacactgacctctctcagcgtgggaggggccggggtgaggcaaggggctcacgctgacctctgtccgcgtgggaggggccggtgtgaggcaagggctcacactgacctctctcagcgtgggaggggccggggtgaggcaaggggctcacgctgacctctgtccgcgtgggaggggccggtgtgaggcaagggctcacactgacctctctcagcgtgggaggggccggtgtgaggcaaggggctcacgctgacctctgtccgcgtgggaggggccggtgtgaggcaagggctcacactgacctctctcagcgtgggaggggccggtgtgaggcaaggggctcacgctgacctctgtccgcgtgggaggggccggtgtgagacaaggggctcacacctctctcagcgtgggaggggccggtgtgaggcaaggggctcgggctgacctctctcagcgtgggaggggccggtgtgagacaaggggctcacgctgacctctctcagcgtgggaggggccggtgtgaggcaagggctcacactgacctctctcagcgtgggaggggccggggtgaggcaaggggctcacgctgacctctgtccgcgtgggaggggccggtgtgaggcaagggctcacactgacctctctcagcgtgggaggggccggggtgaggcaaggggctcacgctgacctctgtccgcgtgggaggggccggtgtgaggcaagggctcacactgacctctctcagcgtgggaggggccggtgtgaggcaaggggctcacgctgacctctgtccgcgtgggaggggccggtgtgaggcaagggctcacactgacctctctcagcgtgggaggggccggggtgaggcaaggggctcacgctgacctctctcagcatgggaggggccggtgtgagacaaggggctcacactgacctctctcagcatgggaggggccggtgtgagacaaggggctcgggctgacctctgtccgcgtgggaggggccggtgtgaggcaaggggctcacgctgacctctgtccgcgtgggaggggccggtgtgaggcaagggctcacactgacctctctcagcgtgggaggggccggtgtgagacaaggggctcacgctgacctctgtccacgtgggaggggccggggtgaggcaagggctcacactgacctctctcagcgtgggaggggccggtgtgaggcaaggggctcacgctgacctctgtccgcgtgggaggggccggtgtgaggcaagggctcacactgacctctctcagcgtgggaggggctggtgtgagacaaggggctcacgctgacctctgtccacgtgggaggggccggggtgaggcaagggctcacactgacctctctcagcgtgggaggggccggtgtgaggcaaggggctcacgctgacctctgtccgcgtgggaggggccggtgtgaggcaagggctcacactgacctctctcagcgtgggaggggccggtgtgaggcaaggggctcacgctgacctctgtccacgtgggaggggccggtgtgagacaaggggctcactctgacctctctcagcgtgggaggggccggtgtgaggcaaggggctcacactgacctctctcagcgtgggaggagccagtgtgaggcaggggctcacgcctctgggcagggtgccagaggcatgagttgggcatcaacaggccaccgtgagggaggagctgggccgcacgcgggctgctgggaggcaggcagggacttggccccgggaggccgccgtgggggcaagagctgggcctggagaggcccctgggaggcaagggcggggcctgcagaggctgttctccaaccagtgctagaactgtacaggccaccaggaggcaggaggtgggccctcagagcttggctggagaaagttcggggcctacaaaggcggttgggagctgggcaggagttgagccaaaagagcttgcttacttgctgggaggcagggccgggagagcccgacttcaggacaacttgggcctgcggcagtcgccgggaggcccaaccttggcgtggaggagcccaccgaccggagaccatttggggcctggagatgccatcggagggcaggagctcatcctggagaggccaccgtgaggcctgacctgggcctggggagcttggcttgaggaagctgtgggccgaccaaggccgccaggagatgggtaggcactgagtccaaagaggttgttgagaggcaggaatcgggcctggagacccaaccaggaagaagagctgggcccggagagaacgcccggagggtgcaagtgggtctggagaggctgacttgaggaggttctgggcccggagaggccgccggaagggaaaaactgggcctggaaaggccgttgtcaggaatgagccccatgggcctgaagaggccactggcaggcgggagctgggtgtgtagaagctgctgaaaggttgggagcttggcttggggggtccacagtgaggtagatgctgggcgtgaagaatctgctgtgaggcagacgttgggactgtagaggctgacgggaggcagaggctgggcctggaggggccaccaagatgcaggagctgggcctggagaggctgcaaagaagcatgagctgggcctggtgaggtcgacttgagaaagttcagggcctggagagaaggctgggaggcaggagctgggtctaaagaggccattgtaacgatggagctgtgcctgtggaggctgttgtgaggcagtagcctcatctgcggaggctgccgtgacgtagggtatgggcctaaataggccattgtgagtcatgagcttggtctgtagaggctgactggagaaagttctgggcctggagaggctgccgggaggtaggagctgggccaaaagatgtaagcacatttgcatttattaggcactttatttccattattacactgtaatatataataaaataattatagaactcaccataatgtagaattagtgggcgtgtcaagcttgttttcctgcaactggatggtcccacctgagcgtgatgggagaaagtgacagatcaataggtattagactctcataaggacagcgcaacctcgatccctcacatgcacggttcacaacagggtgcgttctcctatgagcatctaatgctgctgctcatctgagaaggtggagctcaggcgggaatgtgagcaaaggggagtggctgtaaatacagacaaagcttccctcactccctcactcgacaccgctcacctcctgctgtgtggctccttgcggctccatggctcaggggttggggacccctgctcaagtgcatccaaagcgacccttcccacaccagtcttcacagtggtcaagggcagcaaccacttagctcccaaggcatgtgcctcagctggcatttcgtcacaatcaacagtaagtggtagcttgagtcactgtgaggtcacctactggaaatcaccagcatcccatttcccactggcaaagagctcagcactgccccctgggaaaccaaacctatgcccaaatcccatctgtgtgggtttacctcctgggacccttcctaacatattagtcagagtccaatcaggaagcataaaccactcaaaagtttaaagtggtaaaatttaatacagagaattattcattataacaggtgaacagcataatgagagattggctagcacagagtaaagataactctagagaatatgggactagcccaggccaggcatggtggctcatgcctgaaattccagccattacagaagctaatgcaggaggattgcttaaggccaggagctagagaccgctctggacgacacagtgagaccctgtctctatccaaaagaagaaaaaagttagctgggggtggtggtgcacacttgtagtcccagctactcggaatgctgaagtttgagcctgggaggtcaaggctgcagtgaggcatgattatgccactacagtccagccggatgacagagcaagaccctgtctcaaagaacaaaaccacaacaaccatttacagacagaaaagaaatagagctaataagctgaggaaagatgttgaaatgtgacaagtaaagtaatatgaggtcttttgtctatttaaaataatcaaacaaaaaatggcttactaaattataataccctgtgctggcaaaggtgcagtgaaatgggcactttcttatactatgaggggtggttaaattgtgtataagccttccagggtaaagcctgtcaattttttaaaataatggagacagggtctcaccatactgccatactgcctcctccaactcttggcctcaagcaatcctcctctcttagcctcccaaagtgctaagattatagctgggaggcacccaaaaccctgtcaatttacatcaagggtaaggagaatgtccattcaccatgactcacagtaatcttacttctggggagacaattcaatctaagcaaaaggtcatctgtacacacacagtaaaaatctgggagtaactgaagacagagttggtaagtgaaataagaaacagttataagaaattaaactatggtatcaataggcacctggtaaaaggtcagttgatgttagctgctacttttttgttgttttgagacagggtctcactctgtcacccaggctggagtgcagaggcctgatcatgactcactgcggtctcagcctccctgggctcaagtgatcctcccacctcagcctcccaagtagctgggactacaggaacatgccaccacactaggctaattcatgtatttttctgtagggatggtgactccccctttgtttccaaggcctatcgcaaactcttggcctcaagccatcctcctgcctcagcctcccaaagtgttgcgattaccagtgtgagccaccacacctggccagctgctacttttatcaatattattcttattccactcaattaaaaattattattttcaaggctatgcaacagtatgtatcctacagcgtaattgtaaaaacatacacagtcgtcatccctcagtatacagaattagttccagccccccatctctgcatataccaaaatccatgcttactcacgtttcgctgtcacccctctagaatccacgtatacgaaaattccaaatgttagttgggcatagtggcaagcacctgtagtctcagccacgtgggaggttgaggtgggaggatcgcttcagcctggaaggttgaggctgcagtcagctgcgatagcactactacactccagccttggacaacagagggagaccctgtctcagaaaaaaataaataaataaataaagcaggttagaaactgtgatgaggtctgctgggcaaaattccatataagcaaagtataaattaataaagcaaatcgtgataaattagtacgattgactttctggagtttctgacaataaaagtaaggaaaatgcagaacacaaagacagagagtaaaaagagaaattaggaaagcattctacatgttgaataggaagacactggccatgttcgtgcagcggcagtatgtcgtgacatgacataccttggagagaagttaacagatgaggaagttgataaaaatcatcagagaagcaaaatactggtagcgacactcaagtaaaccatgaaatttccataacttatgtcagcaaagtgggaatattgtacagtgtgtgttgaagttcctatacaacattgtttatctgccttttgtttgtttgtaaggaatgtatatactaaaagttcttcttgctgtcaaaagaatatgcgtgaataagtcattttaacttattcttctgtttttcttttatcttcctgccatcatcccacagccttactttagaaatttcttttttagaaaattgaacaagtgctccttgtggtggcacatacctcgaggatgggaggcaggggtggaagggtcacttgaggccattagtttgacaccagcctggccaaaaaagtgagaccctgtgtctacaaaacaatttaaaaattagccaagtatcgtcatgtatacctacagtcccagctacctgaacttactgagaaagttcagggcctggagagaaggctgggaggcaggagctgggtctaaagaggccattgtaacgatggagctgtgcctgtggaggctgttgtgaggcagtagcctcatctgcggaggctgccgtgacgtagggtatgggcctaaataggccattgagagtcatgagcttggtctgtagaggctgactggagaaagttctgggcctggagaggctgccgggaggtaggagctgggccaaaagatgtaagcacatttgcatttattaggcactttatttccattattacactgtaatatataataaaataattatagaactcaccataatgtagaatcagtgggcgtgttaagcttgttttcctgcaactggatgttcccacctgagcgtgatgggagaaagtgacagatcaataggtattagactctcataaggacagcgcaacccagatccctcacatgcacagttcacaacagggtgcgttctcctatgagcatctaatgctgctgctcatctgagaaggtggagctcaggcgggaatgtgagcaaaggggagtggctgtaaatacagacgaagcttccctcactccctcactcgacaccgctcacctcctgctgtgtggctccttgcggctccatggctcaggggttggggacccctgctcaagtgcatccaaaacgacccttcccacaccagtcttcacagtggtcaagggcagcaaccacttagctcccaaggcatgtgcctcagctggcatttcgtcacaatcaacagtaagtggtagcttgagtcactgtgaggtcacctactggaaatcaccagcatcccatttcccactggcaaagagctcagcactgccccctgggaaaccaaacctatgcccaaatcccatctgtgtgggtttacctcctgggacccttcctaacatataaccttcataacatacttgagaggctgaggtgagacaatcgatttagcccaggagtttgagatcagcctggacgacataactaaatctcatctctacaaggacgaggtgggaggatcacttgagcccaggaatttgtggccagcctgggcaacaaaagaagaccccatctggccaacatggccaacctggccaccacggtgaaactctgactctacaaaaatgatctgggcatgggtggcatgcgtgtgtagtcctagctacttgggaggttgagatgggaggattgcttgatctcagaaggccaaagctatagtgagctatgatcacatcactgcactccagcctggatggcacagggagattctgtctcaaaaaaaagaaaagaaatatatatttaatctctgtccctggttcctggcacagagcttctaaagctcttacaaagacctcagtgatagatgtgacaggagcatcttttgttttaatatttggtcttggtcccaggtttctaacacaagagcctctaagaactttgggatctccagcatggtaagaatgcatttggggatgttgttgagatgactgggtgactgcaagctcctaaatttcttcaagaggagggctgattaccatgaaaccacatggtaagaggcttggaactttcagcctcatgcactgaactccagggggaagaggggctggagactgacttaatcaccaacagccaaaggttttatcaatcatgcttgcataataaagcctccataaacaccctgaaaggggtgtgcagagctttcagggttgctggacacaggagatgctgggagggtcgcatgttcaacagagggcatgggagctctgtgcccctccgaacttaactttccctgggtatctttcttttttttgagacaggatcaggctcttttgtccaagctggagtgcagtggcacaatctcagcttactgtaacctaagcctccccagtccccagctcaaggtatcctctcatctcagcttccctagtagttggaactctaggtgcacaacaccacaccagttattattattattttttaattttttatagagacaggttttcaccatgttgcccaggctggtctcaaactcctgagtttaagcgatcctcccaccttggcctcccaaagtgctgagattacaggcatgagccactgcatccagcatgcacgtctctttcattgactgtttctgagatgtatccttcacaatgaaccagtaataggaaatgaactggccagatgtggtggctcacatctgtaatcccagcactttcagaggctgaggtgggaggatcacttgagaccaggaatttgtggccagcctggccaacacaacaagaccccatctatacaaaaaataaaagaaactagccagatgtggtggtgcaggcatgtagtctcagctactagggaggctgaggtgggagaaccactggaacccagacaatcaaggctgcaatgagctatgactgcaccattgcacaccagcctgggcaacaaaataagaccctctctctcagaaaaaaagaaaataaactgtttttctgagttccgtaaactgttctagcaaattattaaacccaagaagacagttacgggaacccccgattggtaacaggttggtcaaaagtatggtgacaacttaggacttgccattgtcatctgaagtgaggatggcctcgtgggactgagcccctaacttgtggggtctgtgctaactccaggtagtgtcagaataaagtcatgggatacccagttaatatccagagcactgaagaatctggtgtagaaactccatacatacattcagtcggaagtgtgtgagtagagacaaacatgggcttttctgtcacctacctgcttaactgcataggagaggcaatatgtggtgctcatgaacaaagcaaacattaaagtcagaccagacccaacatttgactcagtcttaatatccaggtgagcctgcgcaaatcattcattattcctaaggttttcatcactccattcataaaatggggataactgtggcacctacatgtgattctgtgagaattaacaaaatattatgcttggggttattgtgatcattatacctgttccaaactatttgacaaggacagtgatggatgaagacatcaaaaaatcagaaactgcaatgaggtctctcaggcaaaattccatacaagcaaattactgtgtctacaaagcattcctgccacacttaattcaccattccctgaacaaaatatgccatcttcattgttcaggtctgtacagtgctggtgtcccttcccgggcagtttgcgctatcccatcccggcccattccccatccctccacctcccccttccctccccactctcatacaactcttcctcatctttcaggacttggcttcaatgtcaccttaactggaagcttctctcactctccagaagagcttcccattgcacctgatgcatgggaaacataatttgatcatttttaagttacagtccaaatctttttgtacctgaataacatgttgcccagtcagtctctcttcctggattcacaagtctttcatggtagatccagctggaagtgacaaaaagacatcttttgacataaagggatgacacagacagacataagttcttaaatgtcttaaatgttatgtgaaaattaaacagaattcaaagacttgtggggagcacttaggaagttactgggaatgtcataaagggttaatttgtattttattttattttttgagacagtctcattctgtcacctaggctggagtgcagtggtgcaatcaggctcactgcagccttgaccacctgggctcaagtaatctcacttaatttttatttggtttaagaaactcttggttgagggtggtggcttatgcctgtaatctcagcactttgggaggctgagagaggtatattacttgaggccaggagtttgagatcagactgggcaatatattaagaccctgcctctaccaaaaaacagagtgaacgtgtggaagacaatttttccacagactgggaatgagggaataatttcaggatgattcaagtgcattacatatattgtgcactttatttctattattactacatagtaatatataatgaaatgattctacaactcactataatgtagactcagtgggatctctgagcttgttttcctgcaactagactgtccacctggggtgatgggagacagtaacagaatatcaggcattagattctcataaggagtacacaacctagatccctcgcatgcacacttcacaacagagtttgtgctcctatgacaatctaatgctgctgctgatctgacaggacatggagctcaggtggtcatgcaagcgatgggaggggctagaaatacagatgaagtttcccttcactcgcctgctgctcacctccagctctgtggccctgtggttggagaccgctgctcaagtgcatttgaaaggaaccatcccacgccgttcttcagagtcatctttactgctgcagtggtcaacttgtagcacccctaagcttgcaggacatatgcttcaactggcatttcacaatcaacagtatgtggcagcttgagtcattgtgagcgcacttcctggaaatcaccagcatcccatatcccattgcaaggagctcagcactgctccttggataaccaaacctattcccaaatcccatctgtgtgcgtctatctcctggtacccttcctagcatcaattctgtatttgtaggagtccaatcaggagacacaaaccactcaaaagtttaaactagaatgagcaagatggctcacacctgtaatcccagaactctgggaggccaaggtgggtggactgctttgagctcaggagtttgagaacagtctgggaaacatggcgaaacctcgtctctacaaaaaacacaaaaatcagctgggtgtggtggcacttacctgtaatcccagctactcgggaggctgaggcaggagaattgcttgagcctggcaggtggaggctgcagtgagcagaggttgtgccactgtactccagcctgggtgacagtgtgagacccggtatcaaaaagaaaaaacatatatatatatatatatatatatatatatatatatatatatatgtaaatttaatataaaaagtattaattttggccaggcaaaatggctcatgcctgtaatcccagcactttgggaggccaaggcagacagatcacctgaggtcaggagttcgagaccagcctgaccagcacagagaaaccccatctctactaaaaatacaaaattagctgggcatggtggcacatgcctgtaatcccaactactcgggaggctgaggcaggagaattgcttgaacccagaaggtggaggttgcgctgagccgagatagcaccattgcactccagcctgggcaacaagagtgaaactccatctcaaaaaaaaaaaaaaaggtattaatttttacagaggatcagcacaatgagggacacactagcacaaagtaaagacaactctagagaatacggaactagcagaggccaggcattgtggctcatgcctgtaatcccagcaatttgggaagcctaggcaggaggatcgcttgaggccaggagttggagaccaatcagtgctaaatagtgagactctgtgtctaccaaaaaaaagagacattagccaggtgtggtggtggtgcacacccgtagttccagctacttgggagtctggggtgggagaaatcccttgagcctgggaagtctacactacagtgagccaagattgtgccactgcactccagcctgggtgacagagtgagaccctgtcttagaaagaaaaaagaaaagaaagtgttaatccccctatgggaatctcctcttctcctgccctctctggaacctcacttgtcagttcttcctcccactttcctgtatctttaacctatcccccacttttagctccttcccatcatcatttaaattactcaaacttcttctgttttaaaaacctctccctaaactcagggagaggtcttctgcacacacattgagccatctgctcttcctggtgccttctctacagcagcctgagccatgtctctaatctatgaatctcatcatgttactcccccatttacatcacttctccttgcctcagggattaagtccaaactccttaacagcccctgctctgccctgccttgcaaggcagcctcactgcttgcccctctccattacatctgctatggagtccaactgagcctcatctgccccttgaacgcacactctttctcctctgggagtctctgaagtgggtaatatcctctgcttataatatgcttccccttaaacctctactctcttcctagctagctttgactcctctgtcacttgtccgctttggcatcacctcctcatagaagacttctatgactcccgagattctcaggagcatggcaggtgaagtgctcctcccatgaatggatggagattaaggagtgtgtgttattcatgcttaattcaccagtgcttagctgagtacctggcataaaatagttactgtggtggccaaagtaataacccccaccgccaccaattgctcatgtcctatgttacacagcacaattacataggaagggggaattaagagtgcagataaaattaatgttgctcatcagctgaccttaaaacaagattatcctggagtatctaggagagcccatgtaattacaagcattctttaaaactggaagagggaggcagaaggttaagaaccagagacggtgggcacaatggctcatgcctgtaataccaatactttgggaggccagggtaggaaaatcccttgagtgcaggagttcaaggtcagccatggcaacatactgaggtcccatctctacaacaaaataaaaacaaaattcactgagtgtcacgatgcttacctgtagttccagctactgggaaggctgacatggtaggattgcttgagcctgggagtttgaggctataatgagccatgataggaccactgaactccatcctgagtgacagggcaaggtcctgtttctgaagaaaaaaaggacattggaatcagggccctctccatgctgaggtgcctacaaggcatctctctctgcaaatgagtaaacatcaccctccaactccttacagagtggagcaacaggaaaactccttcacctcatttctgtgctgcttgggaggcctggacagcccaataaccagctcctcactgatgaagcaatcaggaaatggctcgagttgagctaaggagaatttggatccttcctttggttctcagtaggcagggtaggggccaggcatggtggctcatacctgtaatccttgcactgtggggggccaaggtgagaggattgcttgaggccaggagctcaagaccagcctggacaacatagcaagacctgggtggcatacacctgtggtccctactacttggtaggatgaggtgggaggattgatcacttgatcccaggagtttcaggctgcagtgagccatgatcacaccactgcacttcagcctgggtgacagagccagaccatgtcacaaaaagttagaaaaaaaaaaaagagagggagagagactatacacaggcaccaccacatttggctaatttttaaatattctgtagagacaaggtcttgctaggttgcccaggctagtctaaaactcctggcatcaggctgggcatggtggctcatgcttgtaatcgcagcactttgggaagctaaggcaggcaaatcacctgaagtctggagttcgagaccagcctggccaacacggtgaaactctgactctatcaaaaatacaaaaatcagctgggcagtagtggcgtgtacctgtagtctcacctactcgggaggctgaggcaggagaatcacttgaacctgggaggtggaggttgcagtggaccccatcactgcactccacccctgggtgacagagcgagactgtcaaaaacaacaacaacaataacaaaaacaaaaacaacaacaacaaaaaaaactcctggcatcaagacatcttcctgtcttagcctcccaaagccctgggattatactgtttcctataattgaagacacttgttcttatactgctttaaggtataaaggaagaaaaaaaaaacagataatgacaaatgttggtgaaggccgggcatggtggcagcctgtaattccagaacttagggaggctgaggtgggcagatcacttgaggccaggagtatgagaccagcctgggcaacatggtaaaatcccaccactacagaaaaatctaaaaattagccaggcatggtggcgtacacctgtaattttcagctacccaggaggctgagatgagagaatcacttgtgcctgggaggtcacggctgcagtgaactgtgatggcatcattgcactgcggcctgagagacagagcaagcccctatctagaaaaaaaaaatgtcagtgaagatgtggaggaattggaacccacatacattactggtgggaacataaaattgtgtaaccattttgtttgggtatttcttttcttgtcattttaattggatttttaaaaaatcaagacggggtttcactatcttgcccaggctggtcttgaattcacgggctcaagccatcctcctagctgagcctcctgagtagccgggattacaggtgtgagccattgcacccaactggtatagccacgttagaaaacagtctggcagtttctcaaaaggctaaatgtacagtcatcctataatgcaacaatttcactcctaggcatatatcccagaaaaataaaaatatatgtccacacaaaaacttgtacaacaatcttcatagcagcattattcataatgaccaatacgtggaatacatggaaacaacccaaatatccaccaactgatgaacagataaacaaaatgcagtgtgtctctaccatggaatactgccatagaaggaatgaaatattgatacacactatgacataaaggaactttgaaaacactgtgctaagagggaaaaaaagccacaaaagatcacatattgtacaattctatttgtccagattaggcaaatctatagtgacaaaaaattaatcaatggttgcctaaggctgggggcaaaggtaggtggggagagtaggaggtagtagctaaggggtatggatttctctatagggtaatgaaaggttctaaaagtgactgtggtgatcgatgcacagctctgtgaatattctaaaacctactgaattgcagatttcaataaataaagtgaatggcatttgaatattttaataaagctattatttaaaataataataatagggggctgggcacaggtggtcatgcctgcctgtaatcccagcactttgggaggctgaggcaggaggatcacttgaggtcaggagttttgagcccagtcggagcaacatggcaagatcccgtctctatgataaaaaattagctggacatggtggcacatgtctgtagtcccagctacttgggagactgaagtgagagaaccacttgagcccaggagtttgaggctacagtgaaccatgatcatgtcactgtactgtagcctaagcaacagagcaagacgctgtctctgaaaaggaaagaaaacaaatgcaagtttttatcactttgtgagtgtagccaagttggaggagaaatagacaataataaaagagcactgaataatgacggtgagtggctggttaggctcagttgctagctaaatggcttctaaaaaattcaataaagttacagctctggggacagtcatgtagtcaaagaatgaaggcgaaattcattacaattgcccatggtctttatttacatgccttctagtgaaaaattcctaagtgcctaaacagcaagtctgcaatgatagcagctgtttattaaagactacaaaaaagaaatggaggccgggcgtggttgttcacatctgtactccttgaattttgggaggctgaggcaggcagattgcctgaggtcaggagctccagaggagcctggccaatatggtgaaatcccatctctactaaaaatacaaaaattagctgggtatggtggcgggcacctgtaatcccagctactcgggaggctgaggcaggagaattgcttggacccagaaggtgaaggttgcagtgagccaaaatcgcaccattgcactccagcctgggtgacaagagaaagactcttatcttaaaaaaaaaaagaaaaaaaagaaatggcatcttcttcaagaattacatcgtgtttcatgataaagaagctctaattttgcatttgttcaagtattgatgagatttacccaatatgacacccatcttggataaaatgcaaacaacacaatttcattttgtcattaacaaaaccgattaagtagtctaatataaattgcgatcttattaaaaactgatcagattaaaaaaattatggaattatggagccaataagatgttacaacctgttccaaggggaattccaaaatccacacatatctgagaccatcaagtatgatgaaatatatttgattactatattgaaaaataaactgattacatagccaacaattggacaggggtctcctcatccacagccacacaaacccgatcatgcagctatgtggttacaaggcctacatagcctagaagggactggtctgacttgagatttcatttgtatttgtattttgagacagggtcccactctgtcacccaggatggagtgcagtggtataatcatagctcactgcaaccttgaccaactgggctcaagagatgctccagcctcagctgcccccatacctgggaatacaggcaagtaccaccatgtcaggcatttttttcatttttgtagagagagaagacttgctatgttgcccaagctggcctcaaactcctagaatcaagagatctgcccatctcagccacatgagtaactggggccataggtacataccatcatgcctggctatatttattttattttattaaatttattttttttatttttgtagagaggaggtcttgctgtgttgcccaggctgctctcaaactcatggccttaaaacatactcccatctctgcctctcaaactgttggaactataggtgtgagccactgtacctggcctgacttgggatttcttttatctagcatcctttacttggtaggattgggaaaagcagtagtgttttttaaaattacttaataattcaatcagaatcaaactcaaccttgaccactgccttctctcacagctcacaaccagtctgtcaggaaatcctactgactgacttcaatatgtatccaggctctaaccatctctcaccaccaccatgaaccccgtcaggatcactatcatctcccaccgggatgttgccacagcttggcccccatgcttctacccaaatcttcccatagtctttctcaactcggcagccaggtcgtgcttttaaatcaggagacggatcatgtcgcctctctgctcagaagccctcggtggttcccattttagtcagagtaaaagccaaagccccagcaatagcgtcccagggcttacacgatctgtaccgatcccagcccagcaactccctggcctcctcgctgacttcgctccctctatctctttgctccactggcctccttccagagcctcagacacaccagagagtttcctcctaatgcctttatcctgttgactcagcctacaatgctcttccctcagcaccttggccagctccatcacctgcttcaaacttttgctcaatattcacttatgaggccaaccctgaccactctacttaacactgccatctgtccccattcccaccatgctcatttctttctttttgaaacaaggtcttgctttattgcccaggctggagtacactggtgcaatcacagctcacagcaacttcaacctcccaggcttaaacaatcctcccgcctcagccaccctaggaactgagactacagctgcatgccacaacacatggcttttttttttttttttgagacggagtctcggtcgcccaggctgaagtgtaagggtgcgatcttggctcactgcaatgtctgccttttgggttcaagtgattctctgcctcccaagtagctgggattacaggcacccaccaccacacctggctaatgtttgtatttttagtagagatggggttt[141 bp omitted]gttgcccaggctggtcttaagctcctgggcttaagcgatcctcccacctcagcctcctaaagttctgggattacaggcgtgagcaactgtaacatgaggtcccagcttcatgttcattttttgttgttgctacaacaaagtaccctacatttagtggcatcaaacaccacaaatctaccatcttacagttctgggggccagaagcccaactaggtctatcaaggctaaagtcaaggtgtcagagaggctgcattccttctgggggaggctctagacagaatgtgctcctttgccttttccagcttctagaagccacctccattccttgacttacctcgtgactccatattcaaggccagaagtgcagcatcttcaaatctccctctctgacctcttcttccattaccacatcactttctctaattctgactctcctacctcattctcttataaagatccttgtgattggtgggtatgggggctcccatctgtaatcccaacattttgggaggccaaagaggaaggattgcttgaggccaagagttagagatcagcctggggaaaataggaagatcctgcctttacaaaattaaaatcagctggacatggtgatgcatgcctgtagttccagctactggagaggctaaggtgggaggattgctttagcctaggaggtcaaggctgcagtgagctatgatcacatcactgcactccagcctcagtggcagagtgagactctgtctccgatataagaaaagaaatatacatttggtctctgcccgtggttcctggcatagagcttccaaagctcttataaagcccttcgtgacagaggtaataggagcattttctgttttgatatttagtcttagtcccaggttcctgacacaagggcctctaaggtctttcagatctgcagcatggtaagaatgcatgtgggatgctgttgagctaacagggtggctgcaagctccgagactgcttcaggaggagggctagctgccagagaaagcaaccacttttttttttttaaacggagtttggctcttgtagcccaggctggagtgcaatggcacaatctcagctcactacaacctccacctcccgggttcaagcaattctcctgcctcggcctcccgagtagctggaattatagggatgtgccacaacgcctagctaactgttgttatttttagtagaaatggggtttcaccatgttggtcaggctagtctcaaactcttgacctcaagtggtccatgtgcctcagccttccaaactgctaggattacaggagtgagccaccgcacctggccccaaccacattttttgaggcttggaactttcagcctcacctgctgaactccaggaggcaaaaggaactggagattgacttaactaccaatggccagtgattttatcaatcatgcctccataaacacccaaacagcagggtttggagagcttctgtgttgctaaacacaaggaggtcctgggagggtagtgtgcccaacagagggcatggaagctctgtgcccctccccacttaccttgtcctgtgcatctctttcattggctgttcctgagatggagccattacattgagccagtaatagaaaataaggtggccagatgcactggctcatgcccgtaatcccagcactttgggaggcagaggtgggcagaatcacttgagcctaggaatttgagaccaacctgggcaacataagaagaccccatctatacaaaaaataaaagaaattagccaaatgtggtggtgggaaccctgtaattccagctacttgagaggctgaagcaggagaatcacttgagccctggacgttgaggcttcaataagctatgattgcaccactgcacaccagcttggacaacagagcgaggccctgtctcttaaaaagaaaagaaaaaaaacttgtttttctaagttctgtgagttgttctagtaaataattaaactcaacaagagggtcatgggaaaccctgatttctaactggttggtcaaaatacaggtgacaacctaggacttgcaactggcatctgaagtgagggtggtcttgtgggactgagcccctaacctgtgggttctgtgctaactctaggtagtgtcagaatggaattgtgggatacgcggttggtatccagagagttggagaactggtgtagaaactctgcacacacatttggtcagaagtctgtgagtagagagaaacgtgttgcaggaagtcagggaccccaaacggagggactggctgaagccacagcagaagaacataaattgtgaagatttcatggacatttattagttccccaaattaatacttctataatttcttaggcctgtcattactgcaatctctgaacataaattgtgaagatttcatggacacttatcacttccccaatcaatacccttgtgattttctatgcctgtctttaatctcttaatccggtcatcttcgtaagctgaggatgaatgtccccgcaggaccctgtgataattgcgttaactgcacaagttgtttaaacaatatgaaacctgggcaccttgaaaaaagaacaggataacagcaatttcagggaacaagggagataaccttaaactctggctgcctgtgggccgggttgaacagagccatatttctcttctttcaaaagcaaataggagaagtattgctgaattctttttctcagcaaagaacatccctgagaaagagaatgcatccctaaggggaggcctctgaaatggccgctttggggacggctgtcttttacagtcgtagataagggatgaaataagccctgggttcacgtggcgctcccaggcttatcaggacaaggaaattcccgcctaataaatgttggtcagatgggttgtctgctctcaaaccctttctcctgataagatgttatcaatgacaatgcgcgcccgaaacttcattagcaattttaatttcgccccggtcctgtggtcctgtgatcttgccctgcctccatttgccttgtgatattttattaccttgtgaagcatgtgatctctgtgacccacaccctattcgtacactccctcaccttttgaaaatcactaataaaaacttgttggttttgcggcttggggggcatcacggaacctgccgacgtgtgatgtctcccctggacatccagctttaaaatttctctcttttgtactctttccctttatttctcagactggctgacactcagggaaaatagaaaagaacctacatgaaatatcaggggtgaatttcccccgatatcacactggctcttctctcacctgtctacctgcttaacttaataggagaggcaatgcatggtgctcatgaacaaggcaagcattaaagtcagaccagactaacatttgactcagtcctaatattcaggtgagcttgggcaaatcactcattaaccccaagtcttcatcattttgtgcatataatggggataactgtggcacccacctgtttttgtgagaatcaatgaaatattatgcttgatgttattgtgatcatgatactatctgacaagggcagtgatgcatgataacatcaaaaaattagaaactgtaatgaggtctcttgggcaaaattccatacaagcaaattactgtctctacaaagcatttctgccacacttaattcaccattccctgaacaaaatgtgccatcttcattgttcaggtctgtatagtgctggtttccctgcctgggcagctcactccatcccatcccagcccaatccccatccctccacctcccccttccctccccactctcatacaactcttccttatcttacaggacttggcttcaatgtcaccttaactggaagcttctctccctctccagaagagcttccgattgcacttgatgcatgcactattatttgatcatttttgagttacagtccaagtctttttgtacctgaataacatgttgcccagtcagtttctcttcctggattcagaagtctttcatggtaggtccagctagaagtgacaaaaagacatttaaaaaaaaaaaaaaagagggatgacacagacagacatcagcacttagaagttttaaacgatatgtgaaaaacaaaatttaagggcttctaggagaaatgtaggagggaaggtgttactgggaaatatgatagaaggttaatttttattttattttatttttagagaaagggtcttgctctatcacctaggctggactgcagtggtgcaatcacagttaactgcagcctcaacctccagggcttgagcaatattcccatctaatttttattttgtttaagaaatgcagtcttgctcttagcaaagctaaagtgcaatggtgtgatcatagcttactgcagcctcaaccttctagactcaagtgatcctccagtcttagcctccccagtagctcggactacaggtgtgcactgcaacgtgtagctcattttttttttttaatttttagtagagacaaagtgtcactatgttgaccaggttggtggtgatctcctacactcaggcagttctctcacctcagccttccaaaatgctgggattacaggtgtgagctgccacacctggctgagggggttaatttttaattatataaagagctcaaagcaaatattagaaggagcctaaatgcctccagcagttgactggtactggtaaattgtgatacatccatataataaaatattatgcaaccatgaaaaggattaagatagatcaataggtattggcacaaatgtccacgaaatatgaaaatatgaagtgatgttcaatcaccatgtacgtatcttgaaggatatggcccattttctcaactgcaattatttcctgagataagattatgggtctaaagagtgaaggacatttttcacttatttaaaagtatttatcatttttataatttaataaaagattaaacagatcattgaattagtaaaagacaaagtaactctataaataaatggaaaagacacagataccccaggcatggtggctcatgcttataataccagtactttgggagggggtggtggggggattgcttgaggccaggagttccagaccagcctaagaaacaaagcaagacctcctctctagtaaaaataaaaaaataaaaataattggccaggcatagtggcatgtgcctacagtcccaactactgaggtggaaggatcacctgagcctaggaggtcaaggctgcagtgagttgagactgtgccactacactgaagcctaggagacagagcgagacttcatctcaaaaaaaaaaaaaaggacaataaagaaataaagctaataagctaacataaggaaagataaaatatgtgacaaataggctgggcacatggctcacagctgtaatcaagcactttgggaggccaaggcgggtagatcatgagatcaggagttcgagaccagcctgatcaacatggtgaaaccacgtttctactaaaaatacaaaaattaaccaggcatggtggcatatgcctgtaatcccagctaataggaggtctttcatttatcacacagaaaataacttgttaaattataatacctgtgtgggcgaaggtgcagtgaaatggccattttcttgtagtattagtggtgtttaaaatgtatataagccttccagcataaagcttggaaattttttttaaatcatacagacagtgactcattatactgcctcctccaactcctggcctcaagcaatcctcccacctcagcctcccaaagtgctggaattacaggctgacagccaccatgcctgaaagctttgcaatttacatcgagggtaataagaatgctcatgccctgtgactcacagtaatctcacttctggaaatttcacctttggatataattcaacctaaacaaaaggtcatatgcacaaacacagtgaaaatctgggagtaatttttttctctttttttaaaaaaatatggaatgcttcacaaatttgcatgtcattctttcacagaggccgtgccaatctctctattgttccaacttaagtatgtgtgctactgaggcaagcatgagtaatttaagatagggtggttaagtgaaataaggaagaattatggagaatttaaaaatctatgctatttataggcacctagtaacagctcagtaaatattagctgctactattattatttttatggtaatttcactcaattaaaaactgtcgttaaaaattaccattgtcatggaacataatgtctcctactgtataattgtagaaacagatacaatttgtcccttggtatatggggggattagttccagctctcccatttctgtgtataccaaaatccacgcatactcaagttttcgaagtcagtcctgtggaatccacatataacacaaatgggaaaattagtgaggtgtggtgacaagcacctgtagtcccagctacttgtgaggctgaggcaggaggattgcttgagcccaggaggttgaggctgcagtgagccataattgcaccactgcactccagtctgggcaacagagtgagacagaaggttgactttttaatagaatttttctgttcacttgaagatatggtcaggattgtggcatatgaaaattcttcataaaataactatctaatccaattaatgctggaattgggaacagcagaagtgtcatctcacagctactcgcaatgaaaggtgatgtctggggctcaggtgtgttgaggtccccatgccgggactatgggtgctgagtgggatttacttgtccatccattttctatattccagcactgggaaactagggacagtacttgttctcaagggaatcttcagcttaggtggctctgtaaaagagaaattacatcattgaaaaatcgtcgcaggtcaggtgaggtggctcatacctataatcccagcccactgggagactaaggcaggaggattccgtgaggccaggagttcaagaccagcctgagcaacacagtgaaacctcatctctacaaaaaattagaaaatgaactgggtgcggtaaaacattcgtatagtcccagctactctggaggctgaaataggaggatcgcttgagcccaggaagtggaagctgcagtgagctctgatctcaccactgcactctagccttggtgacagagtgagaccctgtcttaagacacacacaaacacacacacacacacacacacacacccaatctcactctgtccagccttgactaatcaaaagggccttctggttacagaagaggtatgctcttttgtaggacagggagagaccagcaagcttgttcacagacttttcctcatcctctgcttagttttccaagaaccctcacagtggaaatggagtctctgggaaaatgacctaaatctttgggttaccaggggagaaatatgcctcctttgtcaattaataaatggaacatctgccttaaaatccagggagttctgctagaatgaatcactccctaagaccc[217 bp omitted]gaggcaggaaaatcgcttgaacctggaaggcggaggttgcagttacttctagaagaatttccattagccctttgaaatccttcaacattcatgaaggccaaagagttttcacctaatttaatctgatgggtatgtgaccagagtctttctagggaatagagactcccaaacagttcgactgggaagtgaggagagaatttattactcaaaaccaaagggaaatgaaaagaggccaacatagaatgtcattattctttcttggtggggaatggattccagagtcattctgtgacctttacatgacctccttattagcatctaaaagcttccagtgtaggatgcagccagctaggttctcttctaatgtaataaaatttgcttcagcaaatcttatgcagagccatctccaggctccagaaacaataggctataaattactggatctcccatttgatacaatgaagtatgagcatggtcctgaatgactcctctacatactactctgggtggcttgaagtgaatttgatacaagaactggagcgagggcaaagcagagctagatctaggattaatgtgcttgggcccagctcctcactactcacctataagtctagttccagaacccaagtagaggatggggaaacaaggctcctgactttttttccctaatgtctgcatctctttcacatttcttatctccttgcaaagaaactaaacaggctcaactgaaataactaaatgattaaaccctatacagagactctccaaagactgacaaaatatcattcaagactgttacacagacaaccttgaggatgacttgatgtaccagtgatctacaatatttgggatcattccaaattcccatcaaggatctgcctatatcaacaaaggagccaaggaccaaccattcaaatgggccctgctgccaagcctttttttttttttttaacaatgccatctcttcatattgttccatttaacaaaactgcagcccttcatctatccttaagtcccttggccaatggtacagggccagagtatgctactccctagcaggaaatcaacaggatgacctactaaacaccattcagaagatgctaagacccatgaattgcaacaggaaagaaaagacagagaattagtcagacaggtacatgctgtgccaaaaatgcactacagcccccacccaattctgcctaatcctagctgggctgacaccaacctgatgagacaggcctataagatctcaaactaaaacagaaactcctgaactgggttctttcgagcccaggaagcagcagtaaatcattaaagaacagataagttcttaaggtgagggagagtttcagataaatggaatgctggtagaacacagggcccaaaggagcaaaagttaacctaagcccaggtagaaccttgtttactagagtattaggcatgggtttgggcaactattctaaccagagaaactggcttcagtgagggcaagttggcaatccaaggtatagcatgcatagggctggcaaaattcagggtgactgaagcaaaagcttcataaccagaaagaccacatctgggggtagagcacaaaactctcaagagatgaatctttgtaagagtgaggcagaactatatagcagttttaggagatctgttggtgcccagcaagagctccaaacgggctatatgcagggatgcaggctgtagtctcaggagaggaggttcacaaaagtcattcagtccaagacctcaaactgcgttctctactaaaaggaatcaaggttccctagagaaacggctgactccatgtatggtgcagtatattgatcctggaacatctgttttgccagaaagcaagaaagccatcaaagtccaacaggatcacgtcaaaaagacatgaaagtcaacttgaagagataattattaacctagatgagacaatgtaagcatccaaaacaataaagactgcaatggcctgaaatacatcaaatgcaaacaataatctatgagttcataatggtattcagaaaaaaaaactactggtcattagagggaaggttactaggtcactaacttactactctgaaaagtgacttaagatgagaggtagggtggagaattagctatttattcagtctttcctgtacaaacataaatttttagggagattgaagcagatgaaacaaatctggaaaaatggaggtaactgcttaatctgcgggttgggtgcatggaggttcaacatatttcttttgtgtatatttgaaccccctacaaaaaaagcacaagacagaatgtgagccaagcagcttagggtttaggcaaggcttctgcctacaagagacactaggatatgaggggtagttttagccctaatgggctgagccaactggaggtatatagggaagtgctaaattgcagaggtatcatgttgcccagcacttgatcaaatcctagatcctaggtctgcttggtggcatgcttcctaagtagtggatctgaggctacctatagaacttcctttgcagtcatagttcgctcagaaactacaaaagtgcttgctcttgaaaatggagtctttgtccatttcatgcttctataaaagaataccacagactgcataatttataaaaaggaaaaaaggaaggaaagaaaaaaggaagggaggagggaaggagggaaaaagggaaggagggaaggaaaggaaggaagggaaagaaggaaaggaaggaagggaaagagagaaagagggaaggaggaagggagggaaggagggagggagggagagagagagggagggaggggaagggaagaaaagggaagagaagggaaaggaggaagaaaaggaaaggaaaggaataaattttatttcttaacagttctggatgttaggaagtccaaggttgaggggcctgcatctggtaagggtcttcttgctgcatcatcccactacagaaggcagaaggaaaagagagtgcaagaaagcaagagggcaaaaggggctgaactctgttttataataagcccactctgtgattactaatctattaccacaataacaacattaactcattcatgaaggctattttattaggccccacatcccaactgttgcattgaggattgagtttccagcacataaactttgggggacacatttaaaccatagcagagcacttaggttaattcaactaagaggagctgggaaaatcaaaggcatgagaaagacagcaaaagctagcagagagaaatgcataggttaaggaaaaaagtcacagtgaatcctgtagtgcaggctactttatcaaaagcacctaaaaaagatctcattaactcccccagctcacctccacgcacatctaaagagccacacacagcaccaccaaaggcagcacaatgagaacagcattctcctcaacagacaagctgggagtatctagacacccgacctcaatagctccagaacagccctaaaacatttcctccctaaccaccactcaagtcaccagcttggaaagtattaagaaaacccaaatcctgacacaccactatgaaacaacttaaaacagcaaagaacaacccatttaaacagcaatgccagctgttggggaaaaaaggaacaatgagtagaggagaaacagaccactcggggtccaccaagacccagtctctcagcttcagcacttttaaatgcagaatccatatccctctggggcctgtggagctccacaaggcatgtcgtcctcaaagataaatgagcacgcaagctggctagaaaaccactaagggtatttattctttaaagaatctttacagggtcaaagaagaatgggtcctaactggctatgtgaactccccacagattctgaggatgatgtcagtatccctttccagatgtgtttaacactttgcagtcacttgtattcctgccactgagtgccagtgctttgctaatttgaactgattccagctcacgctgaccccagctccctggatgttaccattagccaagactgtcacccatactgtaccctttcaaagagtcctaaaaacagctcttcacctactcttccaagacaagtaaaaatgactgccaaagaaatggggaaaaaagattcagagagtgaaaacaattaatatactaacaagagagcaaaaagcaaagggggaggagaaactaggaaaatcatatatgggctctcacctatttccaaagctgggctaatgtccttttgcttgtgtctgaataaggcaccaattttaagctgctaatgaaa[144 bp omitted]tctactaaaaatacaaaaaattagccaggcatggtggcgcatgcctgtaaatccagctactaaggaggctgaggcaggagaattgcttgaacctggaaggcagagaatgtggtgacctgagatcacgtcattgccctcaagccacagcaatgagaacaaaattcggtaaaaacaaaacaaaacaaaacaaaaccaccataaaataactcagacttaattaaatacaaccctagtggtgaatgactaaaaatggattactcataacagagataacggtccaataagaatccaggaatcttaccttttaataacaaaaaaatcctttccttctaaagtaacatcctctcaaggccaggaattccattagtagaaagccttcctaaaaaacaaaattcctggccaggcatgggttcacgtctgtaatctcagcactctgggaggccgaggcgggaagatcacttgatatcaggagtcgaggcgggaagatcacttgacgtcaggagttcgagactggcccggccaacatggtgaaaccgcatctccactaaaaatacaaaaattagcctggtgtggtggtgggcacctgtaatcccagtgacttgggaggctaaggcaggagaatttcttgaacccaggaggcagaggttgcagtgaccagcaaggttgtgccattgcaccccagcctgggcgataagagtgaaaactccatctcaaaaaaaaaaaaaaaaaaaaaattcctttgggaaggccttctacataaaaatcttcaacatgagactggaaaaaagggtatgggatcatcaccggacctttggcttttacagctcgagctataagaacaaaaagaaaaagggatatcatttaaacacagtatgtagaaaagaataattattgaatctgtattggtctttaacttttacactttgatctttaattctgttattgtgattgagtccaaagaaaaacagtatgagtaaaataaaaagaacaccaaaaatgctaatattctgtttaccgaagtctgtagtgaaatatcccattaaatccaagtgcagtgacacatccataatcccaagcactttgggaggctgaggcgggtgaatctcctgaagtcaggagttcaaggccagcctggccaacatggtgaaaccccaactctactacaaatacaaaaattaggcaggcgtggtggcagaggcctgtaatcccagctacttaggaggctgaggcagggagaattgcttgaacccaggaggtgagcttgccatgagctgagatcataccactgcactccagcgtgggtgacagaacaaaacttcaacctccaaaaaaaaaaaaaaaaaaaaaaacagctagcaggtgacatttgctatagggagactagggatatgatcttgctgcaatccttccattttagtaaatctaaacaagtgtgaatccattctgtttcgtccccactccactccagagccaaaacaagaaaatcaattatatttctagttctttaaaaacatatctaactaaatcatctaattaaaagataatatgcatggttccatactctaaaagaaaacttatgtcctgcatatcatggacatttgatgaatgcttattcagttgactggtgtagacttcaataataacctgttcaatgcattatgccagatgaatcttgcatctcaaaagtagaacaaatattgttctttcagttttgtctacccataaatgcaatatttactaataaaaagaaaatgagtttattgttctagagagtatgagaattttgacaacatgaattctcctgtcctaggacataattaatacttagaggcatactatttcatgtggaagctaccattaaatcaatgttaagtgttaattacctcacataatcttctaatctgacttgactgaagacgtacctgacaaagttgatttatcaagttgtaaatcttcacctattgaattcataagttcatgtctgaaaggtgagaataaatacttaatattcactaggcaatattcagcaaagtaatatccactagtacacatttaatatttcatcatgaactgcgggtgtgaagagaaaagacaggctgggcacagtggctcacacctgtaatcccagcagtttgggaggccgaggcaggcagatcatgaggtcaggagttcgagaccagcctggccaacatggtaaaaccccgtctgtactaaaagtacaataattagctgggcatggtggcaggcacctgtaatcccagctactcgggaggctgaggcaggagaattgcctgaacccaggaggtggaggttgcagaaaccattatcacgccactgcattccagcctgggcaagagagcaagattctgtctccatcaatcaatcaataaaaatataaggaggaagcatttactgtgtatttatatgtctggtattatgtgaagcactttactatcttatcaaatcttcgggacagatcttcagttctcatgaccacaaaagaggatactaaagctcagacaggagaagagacgtggccagcctgtgtccccagggcctatggtcttaccactaggttacagtgtttccagataccacatgttgtgagatttttgccttaaaatgaaccaaaaaaaaaccaaaggtgaaaaaggcataagctattaaaaagtgggagaaacactaagagaaccttaagcatgtaactaaaaatattatggaaatgttattgaattcattagcaaatttagtgctaggttttcattgaggagtaggttatattactcatgatgaagaaaaatgttccttttaagtatattaacataaatgccatcaatattgtttatcatgtttaaatgttcacttaaagcaattcagttaaaattctgcatatcatacaattttatagtttgctagtaggttacaagtaaatagtcacccaaataaaaacatcatgttttccactggttgttgctcttttttaggtgagtatttgatgtataccaacagagagaggataataacaaatcgctaatttctttcatcactatataaaggtggcttcaggatagaatagtatcagggcaatgatgaatttgaaatctaacatcaattcagtgatgcatcaagataaaagcagagacaacaggggcaccttgctgagtactgaacattttatttatttacttatttattttgagatggagttttgctctttttgcccaggctagagtgcaatggtgccaacctcgcctcactgcaacctctgcctcctgggttcaagcgattctcctgccttggcctcccgaatagctgggattacagacatgcgccaccacacccgtctaattttgtatttttagtagagacggggtttctccatgttggtcaggctggtctcgaactcccgacctagatatctgcctgccttggcctcccaaagtgctgggattacaggtgtgagccaccgcgcccagatgaattccaaatttaacaaagcagactaagagaaacaattcatttaaaaaaataatatttggccaggcatggtggctcacacctataatcccagcactttgggaggctga[131 bp omitted]gaggcagagaactgcttgaacccgggaggcggaggttgcagtgagccgagatcgtgccactgcactccagcctgggcgacagagtgaggctccgtctcaaaaaaaataaataaataattcaatgaaattcctaagatccagggctttgcaataaatatgtaaataaatttccaatctccatactgaaagtttaaaagaaatgctaactaataactaaagaaatacaacttttcctcagctttgcagcaatctagaaacaaagtgtgtagacactacaaagcaccttacaaggagaaacatgtaaggatggcatgactcgccggcagccctgggcttgtccacggtacccccatgatgaacagtaactccactgtgtaaacgcccatgaacataagattacaagacttttccagtttagacataccatattttctttcagacaattcttcagtttgtttacgtagatcagcgatacgatgattccatttctctgaaaaccaagcaaaagttgcttctcaataacacgtccctatgtcagagcagcactaacgtataatgactgatgtcatatattttacattctaacagtccatatcattttactgctttcaagaaaaaatttccccttcttggtggttcttagaattggtttaatgggagactattagagaagctgaaaagcaggagggcagaaaagttcaatcaaattaaacacaataacagggaggtcacaatgaggcggtctccaggggtcttttagcaaacttcctaaaacatgtctcagctgtgtgaaataagactttacagcagccgggtgcagtggtgcaggcctgtaatcccagcactttggcagcagaggcaggcggatcactttgagctcagggcaacatagccaaaacccccctccctagccccacccccaccccgtccctaccaaaaatacaaaacagcagggcatggtggcgggcgcctgtagtcccagctactcaggaggctgaggcaggagaatcacctgaacccaggaggcagacattgcagtgagccaagatcacgccactgccagcctggatgacagagcaagactccacctcaaaaaaaacaaaaacaaaaacacaaggttaagagggacccccgaccttacagatacaagtttaagagggacccctaagcaaaaaatgccaaccctttttctcccaatcattgaaacaccaggagggtgtaacagttttgcagcctagctgtagcaggctgatgcccccaagatgcccatatcctaatcccgggaactggtgaacatgaccttatatggcaaaaggagctttgcagatataatgaagttaagggtctttggcttttggggttgatgtactcactcggatccttgtaagagcagagcaggtgatggagagggtgggaggtgtagtgacagaagcaggaaactccagtcattcgagacgggcagcacaggctgaggagtgcaggccacctctacggccaggaaacagattctcccgcagagcctcggaagctaccgaccctgctcccaccttgactcagtaggacttactgtagaattctggccttcagacctgtaagggaatacattttggttgttttaagtcactaagtgtgtggtaatttgttgcagcagccacaggaaactagta[131 bp omitted]gtgaaatgccatctatacaaaaaatacaaaaactagccgggcatggtggcacatgcctgtaatctcagctactcaggaggctgagacaggagaattgtttgaacccaggggggcagaggttgcagtgaactgagattccaccactgcactccagcctgggtgacagagcgacgctccatctcgaaaacaaaacaaaacaaaaaaaccccacctgaaggtttccagttctgccagcactctcccacccaacccccagaaacagacattccattgctgtgggccatggacaggcagaaggaagcacctcctcatggcagaggcctacccaggagaaacccaagggaaggcactgctgggctggccctctctgccaaggccatattctttttttttttttttttgaggccagtttcactctgtctcccagactggagtgcaggggcacaatctcggctcacttcgacctctgcctccccagttcaagtgattctcctgcctcagtctcctgagtagctgggatgacaggagtgtagcatgcctagctaatttttgtatttctagtagagatgcggttttgccatgttgcccaggctggactcgaactccttgcctcaagcagtccacctgtctcagccccgcaaagtgctggtattacaggagtgagccactgcacccagcatttgccaagacctttgatggcaggctttttccaggtgatcagtccttgtctggtctggctctgccccactctccttctcacctagttggaatccctagctacttttcagtagaggagagtgtgtaccccaatcccagcttggttcagatctgcatttaagtcatggaacctggctgctccccaggtcctgaagaaaaaaacggtctctctgtgggtatgataaaggatgggcctgtccccaggaccctgtgagagggaagcccaatgtcccaccaggttggcagggctggggaagggaaagtgttatggcagccccaagaaaaaaaagaggcagcagagggagcaggacagcgctcacatggaactcatgccactgcctgaggggagggaggagtgcacgccagtgacgtcagggggcagagaggcgcagttccagggcggctttccccctcacttcctgccatgttactctgatcgcctccaggtgagcctgcccactttgtgcccaggggcctgtagaaaaccacagctccccatggttatggccccaggagtggggcagagcagggaggagtcctggacagaggagaggaaggggcaggagggagtgggcctcaaactccaggagggggcccttctcatgggtcctgctttctggcttctccttccttacccctgggctgatcacttggggaagaactgagacaaagtttctcaccctcaggcccaaagggtttaattactgggcccttagggaggtgtgagccccctgaaaggatgcaaggtttggttttgttttgttttttgagacagagtttcgctcctgtcgcccaggctggagtgcaatggcgtgatctcaccacactacaacctgcgcctcccaggttcaagtgattctcctgcctcagcctctggagtagctgggattacaggtggctgccaccacgcctggctaattttttgtatttttagtagagacagggtttcgccatgttgggcaggctggtcttgaactcctgacctcaggtgatccgactggctccgcctcccaaagttctgggatcacatcagccactgtgcttggccacgatgaaaggttttgtgtggagagcatgtacatgcctttctgggaaaacagtccacagctcttattctcagcaggcttcacggtgaaaaaaggttagaactcttgctacagagctgtggaagcagccaggtgaggggcctgccaagggcactctgggcactacctgggcactctcgagcccatcatcccctaggcaggctgcactgcttggtatttgcagagctgagggggtggggcatgtggggactgtgaaatcgccctgagatgacccacagtcctcagctgggaagtgagcgctgcatctcctgcagcgtcctccatccctacagccatggggccaggagaaccggcccttgcagcaagtgagaagcctattattgattccctccctagccatgtagacagtgaaccaagacactcatatcaggtaaatgccttgttctctgttaccaaggtaaccagtaggcattcccagatacagcgaaggtcctcacaccaagatatgcacctggccacctgaggaaagagaaaggactatctgaggggatggggctgagctgggtgtggagtggtccttgtgggtcttggagagtgggagggggagcagcatgagccaggcctcaaggcagaaggacaaccaggagacagcctggaaaaagtgctggacccacaagggctctaggctggccagaggggaggtgggataggctgtaaagtcctgaggtctgaagattggccctggcaggaagaaaccaggtaaggtggggtgttacctacaccctcggggccagatgcaggccagagccagccaattaccaggcccttagggaggtgtgagccccttgaaatgatgcaaggttttttgtttttgttttggagacggagtttcgctcttgtcacacaggctggcacctttgcccagagcaggcaccaagacttcttgctctgggtgtgacctcagtctgggtaaaagccccagcccccaccagcaccacctaccccctagactacttcaggtgctgagcccaagccaggggcaggaagctaaactgatgcctagggtaatcccaacaaagtccctggttccccgcagctatggggctgatggggaattacagcccaaaccccagatgctggctctcaaactaacactgagccctcagtgcccacagggagatacaatcagcacactttccagatggggaaatgggatcagagaagtgcaacagccttgcccaatgccccagaccagggctccaggcccagagtgttcttttgtcactgtgttcagagggcagcagctgctgtgatgtacccacctgagcctggcagctttctccaactttggaagcccaggagcatggcccctgtccacagatgcacctggcacgaggcgtgcccagagggacagaggcagatgagttgcgtctcctccactggattgtgagggcctagaaggagacaagggtctgcttgagaaggcagtgaacagcgagcagcctgaggcagtgcccctctggatggatgtgcagtgcctggatggaacctggctcagacagagctcagttctgcaggtccctgaggcatggagagttcacagctaccaagtgtaggagtctggattcaaagccaacggcgtcactccaaagtccctgccctagcccctggaccacccttgcaggcccatcagatgctcaggccagcagcacagccggccaagaccagggaaacttggggagcctcagagcacccccaggtattccaacctaaccctggtgccccgcctctcaccgcccttcttcctgcttaacctcaacccctacacaaagcctgggccacttcatgtggcatcaaacagacgcctcaataaatcagtctaatctcgaaaaaaaaaagacttaacagatatacaattgcacgttaaaatgctaaagaccataaacatataacaacttaaagtacatataaattcaatatatatccaatcattgtaactatgacacggtagaatattaaaatactattttcaaaatgtatacaagcttaatgttctatgtattcaaactatttattcaaaatacaaatcatcaacataaattgccactaatattcagtcccttcacaggacatgattcactgggagttaataaattagcagctggcaggcagtgacacaccgcaaaaatgaaaaccaagaggtgaaatagttctgaaataaaggttttaaagctaacagaaatcactgaattactaagtcattagcactaattttgagccaactaactaattaatatgagatgatacaatgtcctatactttggtaaatacagactatgtttaaacaatgtctgtaacgtgacttgtaaaatgctcctggctttacaaagatgtgattaagatgtagtaacacatgctaaaccatttccccctgcagagcatgtggtaactttcatcagtcacattgagagtccagaagataaaggaaaaggtcatggattttgctgagaacttaccagagttgaactccctcattttccgttccccagcattggcgggttctgggactggtggctgtggcggctcgttggtctttgtctcttagaaggtggggaataatcatcatcttgaaaaagaaaaaatggtcattactgaaggaaccatcttaggttacagccacctctgggtcaattcccaacattcaaaagctgagcagggctttaaagctatcttattaataattatttctgtattgcgaacttcagcatacttttttctagttacatttgaaatgttattcttttgggatgtgctcaagtgagtactgctttttcctctgccttgcttcattactttttagtttccttcatttgaatcatcattgtaagtctccccttctcctcaaataactttcaaattgctgccaagaactatgttctatcttaaggcttttgagaaaaaactttcaatgaagatagccgcctaaagttatacaaatatagaagaaacgggataaaataaagcttagattggaaaaaatatttaagattctacaaaattcacgcgtaaacaagggaagctgagtaattgtatgttcaaatacttttaacaagtgcaaaacatgtaggcttaaagaaatagagctggccaggcatggtggttcacgcctgtaattccaacagtttgggaggccgaggcaggcagataacttgaggtcaggaattcgagaccagcctggccaacagagtgaaaccctctctctactaaaaatacaaaaattaggccaggagtgatggctcatgcctgtgatcccagcactttgaaaggccgaggcgggtagatcacctgaggtcaggagtttgagaccagcctaaccaacatagggaaaccccgtctctactaaaactacaacattagccgggtgtggtggcacatgcctgtaatcccagctactcagaaggctgaggcaggagaatcccttgaacccaaaaggcaaagattgtggtgagccgagattgtgccattgcactccagcctgggcaaaaacagcgaaactccgtctcaaaaaaaaaaaaaaaagaaaaaattagccaggagtggtggcgcatgcctgtaatcccagctacttgggaggctgaggcaggagaatcgcttgaacccaggaggctgaagttgcggtgagctgagaccgcaccattgcacgccagcctgggtagcagagcaagaccctgtctcaaaaaaaaaaaaaaaaaaaaaaagagagagagaaagaaagagggctacattatttatgaaacagatactgttaactcagtcaccagaaagcctgtgtataaatgagcagtgagatattcaagcacagcacacacacacttctcaggacagctgtcgtgagagttccatgctcatttccttctgggtacatcagcaactcactctgctatgatcctgcaatacatctcatgttagaattagagacatctgggccaggcacagtggctgacgcctgtaatcctaacactttgggaagccgaggcaggcagatcacctaagttcaggagttcgagaccagcctagccaacatggtgaaatgctgtctctaccaaaaatacaaaaaattagctgggtatggtggcgcacgcctgtaatcccagctactcgggagcctgaggcaggagaatcgcttgaacccgggaggtggaggttgcagtgagccgagatcgtgccactgcactccagcatgggggacggagaaaggctctgtcaaaaaaaaaaaaaaaaaaacagaaaaagaaaaagaaaaagaaaaaagaattagagacatctggatcaaatcagctgccagtctcgcaaagtgtcgggtaatatcctattaagattgctgcttacacatcatctataaaatactgaaaatatcattttaagaaatcttttttttattttgagacagagttttgctcgttgcccaggctggagtgcaatggtgcgatctcagctcactgcaatctctgccccctgggttcaagcaattctccttcctcagcctcctgagtagctgggattacaggcatgcaccaccacgcctggctaattttgtattttcagttgagacagggtttctccatattggtcaggctggtctcgaactcctgacctcaggtgatccactgaccttggcctcccaaagtgctgggattacaggtgtgagccaccatgcctagccaagaaacccttattttaaaacaagccaggcgcggtggctcatgcctataatcccagcactttgggaagccaaggcgggtggatcacttgatgtcagtagtttgagaccagcctgggcaacatgttgtaaccccatctctactaaaaatatattttaaaaattagctgggcatggtggtgggcacctgtaatcccagcttctcaggaggctgaggcaggagaaccacttgaacctgggaggtggaggttgcagtgaacggagatcacgccactgcactctagcctgggtgacaatagaaagactccatctcaaaaacaaaacaaaacaaaacaaaacaaaaaaccactaaaaaaaagactccatttcaaaaacaaaactaaaaccaaaaacacaacacaaatgtagtacacaaatgaaaataattactgtgttaaacacagcttcatagaaaataaaagaccaatcaaatacaataagctgcctttttagatgggtatgttattcttctttcacagctaaagaaacaggctcagagaatgttatttgattggaccgtgttgcatttctggacagtgcagctgagatcagactttgtgtgtaactccactagcctaccagggtgcctctcatgaaggtaagaaatgtaaatctggcctaatatacaaagttgccagggcagcactgggtcaattctacatacagtacttctatgttcatcaagggaaatcttaagggaaagtgaaaatgcttctagaaggcgactggacaccagcgcctttgcttgttgcctttgggctcttcttctaaggccaacagtgacctgaaattattgactggcttttccaatcaagtggacaaaatggtaccaaggtcgccaacatcgatgtagaacatcgatgttctacaacattgcttaacgcaaggggagacgctcctgactcagagtgtttaattgctcacctacttctttttctgccctcttgggcttctgaaatgaaaagaaccctggggtgatacagtgagtcaaaggggtgccagccgcatcacagcaaaacagattcctaaaaaatccctggcctaagatgacagccttggctggatcagtttgaatgtgctgatagtggacatggtagaatgaaggtggttgaaatgttcatattaaagaacttccacccagattgcaagaaaagagagaggaatggagatggcagcacgagcccctacaataaaagcagatgttttgagatcagttatatttcttctgacaaaaattaaagatagaaaccaaagtttagcctgagactacaattaattgggcaataagccagaggcacatatggcatagacagatttaaacatttctccctgatattaatacaaacactaaaattacaaatgcatggattccaaataaaacaaatatttaaaaaatttaatgaataaacactggggtctacagtagtatttgaaggagatctcacaaacaggtttggtttttgaaggttagaactggtggtctagagaattcatttcattccagagaaagaaagagaggaatttcttgggttccttcaggaatgcatctagctttgcctcatctttgtttgaactatggatacggcagaagaaaacatgaggatttcacagatttaaggtacaaaaagtcactgggttctctaagaagtctgggattcttctgctggaaaaataagtttgttgagaaaaaatgagttggaggaagctgttattgaagtcaagcagaattgtttttactaatctgcttattacccactctgtagtgtggaaacaaattattcatgcacaaggtcctcttactgttcctagaatgcagtggaaagagaacagattagttttcctccctcagaacacaatccctagaaacaacctacctcagatgagatattgcctaattattttcaaaagacagtgaaacatcatggatgtaaatgtttgctgcaaaataaatacatgctagaaacagaagcatctgggtcacagctatattagagctacctgtgttcccctgtcactgacattaaaacaaaaatgtccaatacaatcattcacagcgtgggagaggggaagttgaaggatggaaaggccaggcataaaaggatttcagaatttccgtccataaggaagtagctttgtgcactgtctgttactgtgtgcaaggtgaaatttgaagaatgaaaacgtgcagtaacaagggctcctttgtccaactcacctctccagataccaagtttcagacatgttgcattttaattgaaaggttgatataattttttttaaagaacacttgcggtgtttgaagtgacaaaggctgctgtgacaaaaaagcagggaaagggaatttttttttaaaagcaaacaacaacaacaaaaaccccacagaaaagcaaacaacaaacaaacaaaaaacagaggaagaagtcgaacaccctgggctgtgactacttccaggaaggggctacaagaggcagttggaaattctatttgttttgcaactgtgggttttccggcccgcttcctttctaaagtatattactctgcttttggttcatgaagttatccatttctgttttctggaacagctatgtattttctttatctatcatctatctatctatttaccatctatcttttctacctttcgctatcaagagcttgggtcaagcaggatagaattccagtgtatgttcactctaccatttaaaacaagagctcttgtaggcattctccatcacatcataaacctgagctttctaaaacagggtgtggcaaactaccatgcatggaccatgtctgacacagtctgcgtttgtaagtaaagttgtaatgggacacagccaatacatgtgttacataatgtctctggctattttcatggtataatggaagagctgagtcattgagagagagaccatatggcttggaaaacttaaaatatttaacatttagccccttgcagaaaatacttgctgactcttgtttaaaagatctctgtttagaatgctacctattgagttctggatagaatcacaactctttaccacaatcaacaccgcttcagccctgcttctatatccagcctcatctatttctgctcctcctcattttccttctggccatgctgatggattgtcagcttcccagatgtgtgagaatctctcctcccttcctaacattctcatgctctccctctgcctctcaagaacttcctgccccatctctcatgacaaatcctttctacattctttaagatgcagcccttttgctccttccttaaggatgtcttgtctggctctattttgggtgacgtgctccttctgcatctcccagagccagcctgtgtgtgtcagctacaacatttctttgcatctctgtgtcatatatcaccaaatctgcctaagcttgcatgagtcactgcatgacaacttcagactccaccagcattgtccccactaaccacaaggcttagacattcgtccagtatgctcggggttgtggggtggtagcagtaactggctggtgaccatcatttcttacatcagaatcaaatctgtagatctctgccattcataagtatttggagtttaaaattagcataaagattttccttaaaataagaagaaaggccttgagtaggcttttggaacataggatgtttccactggttcatttctgtgttcaatattcccacatgaatctgaacacgactctgctcttagtagctatgtgaccctgggaaagtcactcaatctccctcagctaaattttgttgtgtgagtaatgaggagagagttgtgatttgtatttagtgaataataacaaacaaaaggcatttagctttctggaacctggtatgtagtagaacctcatgaaatactagctctgttgataaaactagactgaaagaagctttcaaagtcaacaacagtttgaggcagtgaaggacgtagaggagaagctgctgctgcagtctgtagctcctggaagcccgttttgtccatgatttagcaggaatgcattacccttccatgaggaggcacagcccacagaaaccaaggccattctttgaagaaaaacatgtcttaatagggtttacattatgtaacagtgtaatacaaataataatttattattagtaataatataaaattatttacagtaccgtaaccctaactctaacccctaatcctaaccctaacccctaaccctaatcctaacccaaaccctaaccctaacccaaccctaaccctaacccaaccctaacccaaacctgaccctagcccctaaacctaaccctaacccctaactcctaaccctaacccctaaccctaaccctaaccttaacccctaacccctatccctaaccctaacccctaaccccataaccccaaccctaaacccaaccccaaccccaacccctgaccctgaccctgaccctgaccccgacccctaaccctaaaccctaacccctaaccctaaccctacccctagcccgaacccgaaccctaaccctaacccctaaccctaacccctaaccctaaccctactccaaccccaaccccaaccctaacccctaacccctaatcccctaaccctaacccctaacccctaaccctcaccctaaccctaaaccacatgagcaatgtgggtgttatattttgggtgtcatgtgtgccttaggaatgctgcatttgtattccaacgctgcaactggaccctgcaatgcagcccctcgccttgccttgggagaatctcggtgcgcaggattcagaggggcttttggtttcccgttttccacactgaaccgttctaactggtctctgcccttgattattcacggctgcaaccgggaaagatttaattcaccgtcgatgcggccccgagttgtcccaaagccaggcagtgcccccaacgtctgtgcttaggagaatgctgctccacctttacggtgtcccccaggtctgtgctaagcagaacgcagctccgccctcgcggtgccctcagcccgcccgcccgggtctgacctgaggagaactctgctccgccttcgcagtaccactgaaatctgtgcagatgagaacgcagctccgccctcgcgatgctctccgcgtctgtgctgaggagaacccaactccgctctcgcaaaggcacggcgcgccggcgccggcgcaggcaggcgcggcgcgcccgcgcaggcgctgttcgggagacgcggcgcagggcatagacgcacgcctccgcgtccccggaggggaggggtctctgggcgggcgggagtgaggcgcggcgcaggtgcaggcgcagagacgcacgtcgctgggctcagggtggcggggcgtgttgcaggtgtacagtcgcacgccgctgggcggggagcgcgggaatggcgaggtgcaggcgcagacacacgtccccggcggcgcggcgcacagacgggtggaacctgagtaatctgaaaagcccggttcgggtgccccctgcttgtacccgggcactacaggacccgcttgcccacggtgctgtgccattgcgccccctgctggcgactagggcaactgcagggccctcttccttacagtggtgtccagcgccccctgccggtgccggggcacggcagggctctcttgctcgcagtatactggcggcacgccgcctgctggcagctagggacattgcagggccctcttgctcacattgtagtggcagcacacccgcctgctggcagctggggacactgctgggccctcttgcttgcagtgtagtcggggcatgccctcttctgtccgctgggggcactacaggatcctcttgctcacagtgtagtggcagcacgccccctgctggcaaccagggcacttcacggtcctcttgctcatggtgtggtgcccctacgccacctcctggcagctaaggacactgcagggccctcttgctcacagtgtagtcgtcgttcgccccctgctggcagctagggacactgccgggccctcttgctgacactgtcgtggctgcacgccacctgcaggcagatggggactaggcagggccctcttgctcccggtgtgacggctggcgtcccctactggccgcctcctgcaccacttaaagtcagagcgccagttattaatccccatcagttctgtaaattaaaactgaaaaggagctattactggggagagctgatgtcccagttattaacttggaagaaagattttcaccaagaggcagtacaaagatggaagataacttcattgaaaagaaatacagtgtaaagagcttattgtaggaaaatagggaggagtgggttcatagtgcatgaaaacagcctaagagtcctgtgcagggaattttattttggacttcttcacattcctgcctctgtctcaagtctatgcttgttttccttggttttcctgctactgccttaggtccctgacttgccccacttaggcttgtgggacctcctgttgattgaggtacacgtggggtgatgaatctgaatccactctggcaccaacctccttcctgccatcccaggcaggctgacagcagtcacgtttgtatctactgcacctgcctcttttgaatgtctttctctgccctaatctgtacttatggtgccaggtttctcttaggaatgtcccctttgtccttcttatcagcatgtagctagcaatattctgacatttttattgcagagtgaatgatgattggggcatcttaagagaagttctagggtgtttctgcgtaggtacctcttctccctcctaaccacaattgacaagtgcccatcctctccagcactggagatgctactaatatgtgcatttttggtggtccctccaggtgagccttcacagactttcccttttccaggagctccccctcctgttcatgtctagctagctatctactctaacagagcccactatcctgtgtctttcccaaaaatagtgagggaattattaattggaaaccataagaaatcatatgcatgtagatgaaaactttacaacttacacaaataatcactcaaaatcatccttacactaaaaaagcaaaactatacaatttctagaagaaactatagaagaaaagctatgtgcctttgcgtttggtaatgaattttaacaaatgacacagaaggttgatatacacagaagaaatgacaatgtggatttcttaatatttacagtttatactctggaagagaccttgttaagagaaccaaaagacaagccacatattgaagaaaatatttgcaaaatacagatctgagaatttgtattcaaaatacataaaaaattgttaaaactaaacaataagttaaacagcccaattaaaaatgcacacagatctgaacagacgcctcaccaaagaagatctacagatggcaagtacacttacaaaaagatgctcaacatactagagaactaaaaaccacaaaaagatagcacagctggtctatatctcttagaactgctaaactctttaacaaatgacaaattgctggaggaaaaacaagaactcttttcattgccggtggaacacagtgtataagaccaaaatatgccaccccaaaatataatggtaggaaaccagaatatgcaaccccaaaatatgtccctttggcttaagaattattccaagctaattattttgaaaaaaaaaaacgctaacaaaggaagttgtgaaaacagagtagaagttacacttgtgtaaggaaaatttacatctataaaggaaatcaccatttaaaagctacctctctcgacaccaagaagagaaggataactaaatcactaaagagtcttatcaatggagaatgcatggacttaagtctgtataacgaaccttacccttgtctaatgtgcttttgctggttaactccccaatactgcacctcaaatcttctttctttaagttgaagacagtacttatgcttgaattgaaagccacctgttggagatttactcatttttccctgagtatctcccatgtaaccataaggtatacgtgtttttctacttttctgtttttctcattttaatctgtcagtttttacagagcatcccatctaagaattctgaaaacagaaaattatttttcctcccctattacaagttgggcatttttttccaaagctaaacaagtctcaccttacaatccaaaaataacattcctaagtattttgacaactactttgatgttatttccaatcaaaagctaccatgcaattatttacataagccctattcataatgaccaaaggaaaaaaacggaatcagaaagtcttacaatagatgactgtgtgggaatccactcagacatcaaaagttgttataaagattatttaaatgaaaacatttgagatactgaagataaaagaagaaatcttaccacaacttactttgtccaattaaagcagagctcccagaaaaatacagctgccattaaccccatccaaggagtttcttgcaaattcagctgccatgaagacagcgtactctttcgcattagcattgataaacaaaaattaaattataagctcccaactgactgaacagaaccactcttggctgaggggaccacagagtaactttcaaaactgagttctcagctttgctaggatgggatgatggggttaacatacacatcgttaaacccactcctttgctaaccatgatgaggctttcttccctaaggatttaacagaaaccagccctttcaaagcctccactactgatatcaacctctcctttcttgcctgataagagaccacccacaacagagaggttctggccagcgtacagaggatgcacagagcgagttttcatgtcctctgcttcaccttttaatgtcagagggctgaaaactccaccctgggatcatgctaacactgccattttttgtacatgggacccatgaagaagccagaaactcaattgtgcatgcatgcatttctccttccataaatattcatgactcctcctggagcttattaaataaatgtatttggccattccagtcagcataaattgctatttcctttacctcctccttgaagagtctgtttctggcttctggctggaggctatgcttcccagcctgtcagaaggacaaccctgcaggctacaaccctttataggaaataaatctctcactggttgggtggctcatgcctgcaatcccagcactttgggaggctaaggcgagtggatcacctgaggtcacgagtttcagaccagcctggccaacatgatgaaaccctgtctctactaaaactgcaaaaaattagccaggtgtggtggtgggcatctgtaatcccagctaatcaggaggctgaggcaggagaatcgcttgaacccaggaggcggaggttgcagtgagccaagatcacgccattgcactccagcctgggcaacaagagtgaaactctgtctcaaaaaaaataaaaataaacataaaaatgaagaaatgtctcctttccaaatttatgaacctcatcattcttccgttgacagcattaaaaggttcaaaaagacctttccatactctcccacagaagccctagaaattgtcattttgttcatcattctggatgcctgagaacttgtaatccaatgagtagaaagtttggtaccccatttatggctgtcaacctgccagttctcaggagtttgtaaaagcctaaatccgaaaggatctcatcccattaggacccttgtctccttttctgttgcctttgcccactggctctggcaacaggggtctttctttctccttggctatctttggatatgggggctccgtcttctgtgccaccttagggaatgccttttgcatgcatggctaagtcattaaaaagcctacagtttcagtaacattttgagtgagtactctctgaagctgcgttggaatctcaggcttctttgtctggaagataactcttgggctacaagtttcttatcctagctttggttttgaggcctctctgttctcctcttgggttggaagttattcctggctttttgtttcaaggtgtctctgtgatcttgaacttgctcctttcatgagaacttctcagttgactaaattctcccttctcaaacctctgctatgtgttccaccaatatggaactaattctacttcctttcctgtttacatgattttactaagaattatttagaaatttaattgctcctttgagaaaatttttatcttccaaattgcctccttttagacttttcctttcccagttgagtctctcaactccctgtaatcactgaaactttaggcaccccactccatgccttggaggctctcaatgtgctcaagaatctgcaaaagcaaacacctggggctgaaaaataaaatagaaaaaaaaaatatttctcatcctccataagattgtatgtgaaaacaaaagaaaaccttaaaaatctccaaaaatattggtgagaaaaaagccttagccctcatatgaagaagaaaaaacttgttccattttccagttacacagttataatacaaatataaaatgaggcaaagacaaaaaccaagtcttctatataaactagtgaattttgtagtattgcaatcacattagtcagggttctccagaaggcagaatcaataggatatatgtagatagatgagagaagattcattaggggaattggttcacataattatggaggctgagaagttccacaatagcctgtctccaagttggagaaccaggaaagctggtagcgtggctcactccagatacaaaggactcagaatcagggaagccaatagtgtaactctgattctgaggccaaaggtctgagaccctgaagttctgatgtcaagggcaggagaagaaggatgtttccatttcagaaggagataattcacctttcctcttccttgttgttttatctgggctctcaaccaattggatggtgcctgtattcatccatttttatacagctatgaagaaatacctgagtctgagcaatttataaagaacaaagaggttgaatgggctgacagttccacatggctgcagggccctcacaatcatggcagaaggggaagcaaagctgtccttcttcacaaggcagcaacaaggagaagtgctgagccaaaggggaaaagccccttataaaaccatgagatcgtgagaactcactcactgtcatgggaacagcatggcagtaaccaccaccatgattcagtcacctcccactgggtccctcccacgacatgtagggattataggaactacaattcaagatgagatctgggtggggacacagccaaaccctatcagtgcccatccacactggatcatgcttatctcagtgtcttccagaaacaccctcacagatatgcccagcaattgtgtttgaccagctgtgtgtgtctctcaatccagccaagtagatgtctacaattaaccatcagaatatttatgctagattcatggctgaaattgtgtttgaccagctatgtgtgtctcttaatccagtcaagtagatgtctaaaattaaccatcagaatatttatgcctgattcatggctgaaatcgtgtttgaccagctgtgtgtgtccttaatccgatcaagtagatgtctaaaattaaccatcagaatatttatgcctgattcatggctgaaatcgtgtttgaccagctgtgtgtgtctctcaatccagtcaagtagatgtctaaaattaaccatcagaatatttatgcctgattcatggctgaaatcgtgtttgaccagctatgtgtgtctcttaatccgatcaagtggatgtctaaaattaaccatcagaatatttatgcctgattcatggctgaaatttcaggatgaaagctatgaaatctctatttctgtttgtacatctattaatgtatgttatgtatatgtgatattttcttaactccggagagcattgcaaaattcatttataaaatcctctaaaagtgctctattctaacttggcttggaaaaaaataagcatttataaataaatattcaccaaactcctagaaatataggaactgatcaaatgttttttaagttaacacgatttggataaaacttagttaaataagattaatataatatttttggggtagccattgtgggttatcagattctagtcttgtttcttgtttctgggctatttttacctctttgtaaactggatcctgccatctgatgaattttgtcccacaatgatacttgggcaacaagaagccaagtattttctctcctagtaatgtatctattgtcatttaatttgaaggtcttcaaccctggaacaaagttagaagaggaaggttttgatccccaaaatgcataaccaaattgtggtacattcatgcaatggaatgctatttagccatagaaaggaacaagatatcaacacacacaaagacatgagtgaatcttgcatgcacattgctaggtggcagaagacagtctgaggaggatacacacagtgtgacctcatttaatgagacactggagaaggcaaactacacagatgggaagccattggctccatagggtggaggtttgaggcattccatatgatactttaatagtgggatacctgccacaatgcatttgtcgaaatacgcagaattttacggccaaatggttaaagcaaactctattcaaattacataaaattactcaggatgtggagtatcccacgacagaatacatcatgtgaaaaagaatttatgctacaaattactatggtttggatgtggtttgtccccgcaaaaactcatgttgaaatttgacccccactgtggcagtgtggggcggtggggcctagtggatggtgtttgggtcgtggggacggatccctcatgaatagattaatgtcctccatggggtaagtgaattccattctcacaggaatagataattcctgcaggagtaggtaattaaaaagagtctggcttccttggcttccctcttgctttcacttttgctatgtgatctctggtgcaccccttgctccccttccactttccaccatgaggtgaaaaagactgaggccccatcagatgcaactgcccaatctgagacattccagccaccagtattgtgagccaaatgaaccttttttacttaaacatcagaatatttatgcctacgcataatattcagaatacgcagcctcaggtattctgttacagaagcacaaaatggactaagacacaaatgtaggtaaaaactcactgaaggtgtagagaaaatggtgttgacctaagtcactttgaaaatgaatagaatctgtaggctgaaggcaagtgaactatacttcatcattggattccattttataaagttctttccaacagaagcaattgtgaacaattgtaaaaccacagtgtctgtatctggaataaaacaatgacttacataagtcgcagatggtgggaaccagctttctcactgttgaagtgggaggttacaaattagcaaggtgagaagactagaatgattcatgtaatagtagatcagaggtggagacatcaatgtaaacttatgtttagtttaatatagatgcacagttctacatagaaaactttgtaattaggtgtgtaaaggtaggttagacacacacatatacttcctagcattgccaataagggagaagatacaatgtgctcattcagcagccagatgtaagttttcctaccattctgaaaggaatctgactctttgaagaaatgtctgatactagaactgggacagtaaatataggagccaggataatctggaaggatcagaaagtaagtaagtactaaaaaaattaaaatatatcaaagaaaaataagagccaataaaaacagctactgatggccaacacaggaatgaattgtgcaacataatactgtagtgttgaataataactaaagcttaaagtaattatctaggtgtctgtatttgtatacataggtgaataagcaaatggagttgcatagaaatctcctttgcaaaagaattccaaataattgatgtagacactcagccatcaagaaagtggagccaactcctcactctgtaagtgtgggctctgcatagtgacttgctccaaaagaacacatgcagtatggacaaggaggagaaataacctcacagtggagaaatctgacaaacagtagctctgccaaacgatccaagttaacatcaaagctgacagttcaccttgagaacatgaagtgacaatggggggcattctacaaaatgcctgacccatcctcctcagtactatcaaggtcacctgagatggaaagcctgacacactgtcacagccaggaagagcccacgtgatgactacatgtcatgcgggatcctggatgggatcctgggtcagagtaagacagaactaagggagtccaaatgaaatatgaactttagttaataatagtctcagtattggttcattaactgtgacaaattatgtaagatattaataagccatgtgagacacactgatagaagatgttaataagagaggaaactaggttgcggctacatgggaaatctctgcttttttttgacaatttctgtgtaagtaaaaaaaatgatgtaaaataaaactttatttaaaacactgttttttttgaacacttccttgtttaattatttataccatgaattactagtaattgacactgttaactagtcctgtttttttaaataagagtatttatgacacaaaaaattaaacagtgcagactgatacataaatcaaatgttctttacatgttttctgttgcagtagtaacacacatgtgtaaacttaattatcacatgtttttcttgtgctgtggttgtgtcctgggttcattctctaaaatgctgttcatcttagaccaggaaaaatattaaccttacagactctgtttcaattcatagctaaatattttcaaaagagtgactttgtaaaaatatgttccaatggcaaattgattcattgtgatgggatcacttattccaaagacttcctgtctttattttgttgccatgcctaccttttagccatgatacaacagaatcaaatattggccactgggaaaaaatattcaaagaaagaaagaatgtgaacagaacttatgaccatgatgattcaatgttttaccacaatgctttctaaaacagaagagtgtaaaaggatattcaaagtcaatttcctcactgaggctttgcagaaaatgaggaaactagagaaacaaaaatggcgggacattctacgggtgattttaaatgttgctatgttttatgggaaaaaatactttaccttttaaagaatcacaaagaattgttggaaacccaaactctggaatgtttgcaaatttagttgagcttctatgtaattatgtctatataggtagccacaaagttgatgatttttaaaaatctgtgccttatttgtgtaataaaatacacaatgaataattaatgttcctaggaaaaccttatgaagggaaaataaatcttggggaatcaaaatcactaagctaaaaggaaaagtcaagctgggaactgcttagagcaaacccgcctcccattctatccaaagtcacccatctgctcactgagataaatgcatatctgattgcctcatgtggagagggtaatcagcaaagcaaaagaatgaaaccatttgtctcttacctacctatgacctggaagccccctgtctgtccttctcacctttctggactgaaccaatgtacatctttcacatattgattgatgtctcatgtctccctaaagtctataaaaccaagctgtgccccgaccacgttgggcccatgttgtcaggacctcctgaggatgcatcatgggtgcacatcctcaagcttggcaaaataaactttctaataaatctgagagctgtctcagattttcagggttcacacatgtaatgtaggatgtcaatgtttataaaacagacattattctatctactattagaaatatgctaccaattaaccttagactttctcaacaaaataaaaaatgttgatgaggtacaaataatatactaagcttaaatagtgttgcaagttttaatatgcaacactatttattaacatttattaaaatgttaataaaattaacatttttcaatactatttttactaatttaacactgtaagaaaagtgaataattaaaacatgaataaaagggtttacaaggggtgcacatgtttcctccagtctctgcctatccccagctttcatcccaactgtcttgatggtggctctaagcatttctcctttctctatgccaagatctctcccagaaacaaacccaaatcttactatatattatggcacgttatgatgatgagcagtgatgagcagccgaagcctcaaggaagggatgcttttgtaaaacaagacttgtagaatataacgtgtgaaagtaaagcacatggcagagctccctcctcagcacacgcggagcagacaggaagcttttgcctcaccttcctcaatggcctgcagccacgtctcccaggtcagtcttaaggacaacgaaactctggtcttcactgtggacacgccacactaccaggtgctccaaagccatggtgactcaccctcgggtgggtcctgagcacaacaaagctctggttctaatcctaaccctaaccctgtcccaagactttgaccctgaaccgaaatcctgatccctaccctggtccctaattctgacccttactttgaccctgactttgatcttgaccctggccatgaccccacctctaaccatacttccggccctgactctgacccagatcctaatcctatgcctaaccctattattatctttacaatctaactctaatcttaccctctagtgctaaatagctgtacccaaaagcacttttaaattatttaacttcttttcttgaattctctatggacatcctaaaggagacgtcattatgtattttgcattccctctgagtagtatggcttcagatatgaagttgtaatactttgcaagacataaaaagtttggagggtaacagcactgggttgttagggatgcatgttggcattcatgatagtcattggtgctgttctccaaatattttcagttcattttttatgaacgcattctgactgttccatcccacccacttaaattttcccatggctacatgactttttttttttttttttttttttttttttttttgccgatggaggtgagaagaaataacatgtgactttttcaggagaaatctccaagaaacagcgttctattccgcatgcttttttctcttttctatagcaatggggatcttattgatggtccctccttccttctggattcctgtgttaggatgacacagcacagagctacctctcacctgacccgtgatgagatgtaaataaatgaggaagaagatttttgagccactgaaatttggaggttgtttgtcaccacagtttaagctagcccccactgactgatgcacggctgaagaatgagtccgaactggctctggacaagacatgtgaagagcgctccaggctgagtaaaattcaagggttgcctcaaagataacactgagcacgatatgttattggggtgggtgtgggataaataaggtacatcaggtgagaataacaagaaactcaactttaaaagacggcgctgatttgcactgtggagagattcaaatgccctgcttagcatttgagattgtgatggatgaacaaactaattaagagcccaaaatgaaagctggggataaatatctgaaggtgtctaatatcccagtttttcatcctagaatgggcagagtccttgaccccattctagggagatttccaaaagaaaaaagacctgcatttcttcagcaacccacactgagagactttcctgcacttttgacctgtggctaacactcctcacctttcattctgtcatcagtgttttggggaagcacctttaactctctatgatttacaggttattcctaacctgtaacaggttacaggttacaggttattatgtaacaggttacagagcaagacgccgtctcaaaaaaaaaaaaagagagacaacactattcttaataacctatataaacaaacactaagcccagatgcagtggctcaggcctgtaatcccagcactttgggaggccaaggcgggcggatcacttgaggccagcagtttgaaaccagcctggccaacatggtaaaacccagtctctgctaaaaatacaaaaaattagccgggcatggtgacacacacctgtaattccagctacttgggaaactgacgtaggagaacccttgaacccaggaagcacaggttgcagtgagccaagatcatgccattgagacgagagtgaaactctctcaaaaaaaatttttttaatttaaaacaggtgcgttccttctcctgctttctgaggacgccctgctctgtaactgaatagtcgctaataaactctcttaccttcactatactctgtgacttgccataaattctttcccatgtgagatccaaaaacccactctcggggtctgggacaagactccttttctggtgacaaaattattcaaattctagaagaaaacatagaaagaaagctatgtgacattggatttggtcatgagttttaacacatgacactctcagaggcatttgaaccacagtgaatccatcttgattaagggctgggtaaaataaggatgagacctgctgggctgcgttccgaggaggttaagtgttcttaatcacaggatgagataggaggtcagcacatgatgtaggtcacaaagaccctgctgataaaacaggatatgggaaaaaaaaaaagtccaaaaccaagatggagatgaaagtgacctctagctgtcctcactgctcactatacactaataatatattagtgtaaccatccaagaggttcaccttgccctctacctacatgctggacagccaggcacggtggttcgcgcctgtaatctcagcactttgggaggccgaggtgggaggatcacctaaggccaggagctccagaccagccaggacaacatggcgaaacccctatctctactaaaataaaaaaataaaaaaattagtcggatgtggtggcgggtgcctgtaatcccaactactcgggaggctgaggcaagagaatcacttgaatccagaggcagaggctgcagtgagtctagatcaccccattgcactccagcctgggaaacaaaaacaaaactccgtctcaaaatttaaaaaaagacaagacacagaatgaaacgtaacatttgcaaaatagagatctgagcaacaatttgtattcaaaatatacaaagaattcttaaaactcaatagtaagataacctaattaaaaatgggtcaagatctgaacagaaacatcaccaaaaaacatgtagagatggcaaataaacataccgaaagaagctcaatttcgtatatgattgggggactaaaaattccaacaataatgagacccagcggtgtgagacggtgtgaaaacccaatggtgatgagacagcgtgtgaaaattccaacagtgatgagatggcgcggcccatctgtacccgctagaactgaggcaggaaaatcaagtctggaatcaggaacataaggcggattcacacttcaactatgacaggaaatgtcctctccacagggctactccaagtaaatgactttgtaactttacttcatcctcttcatttacacggggtggacaccaagtaaccattgaaatcctttagagggtatttaaacccccagaggttttgcaacggggcccttaggccctatgctcagcccgctcccacactgtggactgtactttcattttcaataaatctctgcttttgttgcttcattctttccttgctttgtgtgttttgtccaattctttgttcaagatgccaagaaccaggacaccctccaccagtaacacaactgctaagctctaaaaaaaactgacaaatggcccggcgcggtggctcacacctgtaatcccaggactttgggaggccgaggcacatgcatcatgaggtcaggagattgagaccatcctggcaaacatggtgaaaccccgtctctactaaaatacaaaaaaaaaaaattagccaggtgtggtggtgaacgcctatagtcccagctactgggaggctgaggcaggggaatcacttgaacccaggaggcggaggttgcagtgagccgagactgtgccactgcactccagccctgagacagagcgagactctgtatcaaaaaagaaaaaaaaaaaaggactgtggggaaaagagagatcacattgtttctgtgtctatgtagaaaaggaagacataagaaactccattttgatctgtactaagaaaaattgtttctgctttgagatgctgttaacctgtaactttagtcccaaccctgtgctcacagaaacatgtgctgtattgaatccaggtttagtggatttagggccggtgcaggtcctcacatgctgagtgtgccagtcccctgggcccactgttctttctctatactttgtctgtgtgtcttatttcttttctcagtctcttgtcccacctgacgagaaatacccacaggtgtggaggggcaggcccccttcaaaggacaaatgaattgctggaggaaaaccaggaagtctcgttcaccgctagtggaatgcttaatggtacagccattacgaaagatggtgtagaagaccagaatatgccaccctaaaatatgactctagagactataaaaaatggctctttggcataaggattattttcaactcattttcagaaaatgcagacacagaaacagagtagaagttaaccttttataagggaaatttacatctaccaaggaaatccccattttaacagagtctccctctcagtaccaggaacagaatgatgactaaatcaacagaggttcttctgaagggacttccagaaacaccttcacaaatgcacccataaaaacacacccagaaatagtgctttaccagctatgtgagtatcccttaatcctgtcaaggggacagctaaaattaaccatcccagtatttatgcctaatttgtggctaacattttatttttacatttttcttattattattattatttttttttgagacagagtctcactctgtcacccaggctggaggacagtggcacgatctcagctcactgcaacctccacctcccaggttcaagtgattctcctgcctcagcctcctgggtagctgggactacaggcacacgccaccacacccagctttttgtatttttagtaatgatggtgtttcaccattttggccaggctggtctcgaactcctgaccttgttagtatcattattttttttgagacggagtctcgctctgtcgcccaagctggagtgcagtggcgtaatctcagctcactgcaacctctgcctcccaggttcaagcaattcggctgcctcaacctcctgagtagctgtgattacaggcatgtgccatagtgcccagttaatttttgtatgtttagtagaaatggggttccgctatgttggccaggctggtctcaaacttctgacctcaggtaatctgcccacctaggccttccaaagtgctggaattacaggcgtgagccaccacgcccagccaagagcaggctgttaaaaagagtctggcttccttggtttctctcttgctttctctctcgccatgtgatctcaggtgctgggattacaggcgtgagccaccacgcccagccaagagcaggctgttaaaaagagtctggcttccttggtttctctcttgctttctccctcgccatgtgatctcaggtgctgggattacaggcgtgagccaccacgcccagccaagagcaggctgttaaaaacagtctggcttccttggtttctctcttgctttctccctcgccatgtgatctcaggtgcacactggctccccttctgctttccaccatgtgttgaggcaccataaagccccaccagatgcagctgcccaatcttggatgttcctgccaccagaatcataagccaaatggaatgaacttttttttcttttcttttattattattattattattttttgacagggtcttgctctgtcacccaggctggagtgcagtggtgcaatcatggctcaccgcagcctcgacctcctgggctcaagcaatcctcccacttcagcctctcaaggttgggaccataggcatgcaccaccatgcctggctaattttttaaattgtttgtagacatggggtctccctgtggtgcccaggttggtctcaaactcctagactcaagggattctcccatcttagcctcgcaaagtgccaagagcacaggtgtgagctaccatacccagccagacataacattttttttttttttttgagacagagtttcggtcttgttgcccaagctggagtgcaatggtgtgatcttggcacactgcaacctatgcctcccaggttcaagtgattctcttgactcagcctcccaagtaactgggattataaggcgcccgccaccacacatagctagtttttctatttttactagagacagggtttgaccatgttggccaggcttgtgttgaactcctgacctcaggtaatgcacctgccttggcctcccaaagtgctgggattacaggtgggagccgccatgcccggccaacataaatttttaatagcgttttctaatgaaagcaatgagggctctctgaagaaatggccaatacagggactgggacagtaaatatatgagccaggataattaacataccagaacaaaagaaagtactcaaaaaatatgaaattatgtcaaaaggaaaaaagaaccaatggaaagagctcccaaaggccaaagcagaaacaaattgagcaacaaaatactgcagtattgaataaccaaagcttaaagtaactgtctatgtgtccacatttatacaaataagtgcataagcaaataaagttgaatagaattctcctttacaaaagaattccaaataattgatatagacactcagccatcaaagaggtggagctaacatcccactccttaaatgggggctgtgcatagtgacttcctccagaagaatacatacaatatggacaagtaacttcacagtagagaaactggacaaacactagttcagccaggtgatcacagttaataccaatggtgataattcaccttgacaccatgaagtgacaagaatagcacttcacctctgtgatctgcttcccccaaacccataaccccagtcaacttctcagaaaagcaccaggtaaataacaatgggagacattctacaaaacgcctaaccagtcctccttaacaccgtcaaggtcattggaagaaggaaagtctgagaaaccgtgacagccaagaagagcctaaggagtcgtgacaacgaatgttacgtgggatcccgggtgcgaccctggagtagggaaagatagaactaagtgtaaacagtaaagttgaggttcctcttcaaagactttcctccccatctaattaggaataaatagtaacttctcttagatgtaaaaattattcaaagatctgtgctaacattcttaaatatctgctggccgtaataaagaaatcaaggtactgtatgttcttagcgcccacaatttagcctaaatatttgcctgacatgcttatactggtccaagcaagcattaggttatagcctcttcctcttccttatttgaaggtgtttttacctttcacagcattccacaagttacttcttccttcctttgttatcctctgcctttgcctcttttaaaaatttataagttgctagaagatcagaacaaatacagaatgtggggtcccgtttcagccaatggaaaccggacacagcagtagggtggatgcgtcaggttataaatgaccttgtctcctttgttctggatactctcgtggtaaaactgctggcgagtgtaccctttatgcagaaagtaaaaaaacggccttgctgaggaaattaaatttatgttcaagtgctatttctttacagcaccggggaacaagcatttctaacatgaggaactccaaataaaatatgggcttcagttaataatagcatatcaacatttgttcattcactgtgacaaatgacgtgagacatactgatagaagatgttaataagagaggaaactgggttgaagctacatgggaaatctgtgttttctttgttatttctgtataaatctaaaacaactctaaaataaaacttaatttaaaagtgttgtattttttcaaacacctgcttaattatttgtactagtaattactagtaatttaccctgttaactattcctgtcttttaatcagagcatttatgacataaaaattaaagcatacagattaatatctaattccaaataaatgcctctacatgttttatgttaaagtaataacatagatgtataaacttacttcacataattttttctggtactgtggctgtgtcttgggttcactctctaaaaaggtggtcggtcgccttttagacaaccaggaaaaaaattcattttagagactctatttcaattcatggttgaacattgtcaaaagaatgtttaaaaaagttccttagtatccaagatttaaaaaaaaaaatgtttcaatggcaaatcgattcatcgtgactggatcactttctctaaaatatccctgtctttgttttccatgcatgctttttagcaataatacaacagaatgcaatattggccactgggggaaaagtattcaaagatagaaagtgaatagaatttgtaaccatgataatttaatgtttcattgtgatattttctaaaacagaagagtttaagaatattcaaagtcaatttcctcaatgatactttgcagaatgtgatgaaactagagaaacaaaaatggcaggatattctgagtgattttagatgttgctaggatttatgggaaaaaataatttacctgttagagaatcacaaataattattggaagcccaaactctgaaatgtttccaaatttagttgaacttgtaagtaattataatgtcaatatagctagtcatgaagttaatgataaaagacgacccatgccttatttatgtaataaaatatacaatgaatgattaatgctcctcggaaaatacgctggacttgaactacaattgagagtgtcagaatcaaaatatatttgattgtataacaggagtagcccatcatgaacaaatgtatcatctcataaagtatgctcacgttaaatatactgtcagaacaatggaaaaagctgttttgcctttgttgaaagaataatggagacagtccagcttagggaattattaggttggaaacatacaatgctggcataagaacgtcctggacagggatgtaacagtgaacagctctggcaggtgtaggaaagggtcgcagccatcatatcccctccccaaatgctcaaactaaatctgcacatacgtctgtattaggatttggtacatgttatttcgtgtggggaggtataaacaatgcatttaaactttacgtttctagttagaatatgcctattgctaaatatttccatactgattcaactacttcagtgctgtgagacaaatgagctattacaacacgaatgaaagcgctggcgactccgcagcgccggccggtccccagccatcacccgcgccgtcccgatggcgccgctcgcgttgctcctttctcggcgccaggatctctccccaggaaccagcgcagatccggaggccacgctgcgctgcgctgcgctgcgctgcgctgtcaggacgcgcagttcccgccccgctgaagggacaccgttttacaacacgccgcgtagaccgtgacagggaagtaaggcccacggcagcgctccctcctcagcactcgcggccgcggacaggacgccttttcctcctcctctcacctggtgaccgggtgtcccgaaccgcggccgctcccgggcgggtcctgaagagaccgtggctccgtcttcccggtcgacgccccggggcgacgagtgcggatccgccgcggttcccgcgcgtgctccaggttgggcgggagccgggcgccccctcgcggcagtcctggggagtctctgaaaatcagcgttcggatgactgcaggccgtgatttcggaaatgtcaactgaaatcgaggccaccatcccgtgccttgatcggaacggatggagattttaaaaactaaaaaagatggcccgggcgcggtagctcacgcgtgtaaacccagcactttgggaggccgaggcgggcggatcacccgaggtcgagagtttgagaccagcctgaccaacgtggagaaaccctgtctctactaaaaatacaaaattagctgggcgtggtggcgcatgcctgtaatcccagctactcgggagtctgaggcaggagaatcgcttgaacccaggaggcggaggtttcggtgagctgcaccattgcactccggcctgggcaacaagagtgaaactccgtctcaaaaaaataaaataaataaaataaaaactaaaaaagatgtccagtaggcaaaagtcagttgagtttcttcatatcaccaataatggatggaaataattggaactagaaatattaaaataccatttacaatagcacccctgaagctgaatccattaagtatcagcgtaacaaaaggtgtgcaaacatgcattcggaaaaccatgaatcacagttgagagaaaccaaaagaggtataagtaaatgcagagatgttccttatttaggagaagtacactcattattgtgaaggtgacaattctttccaaatcgatctatagattcagccaaatcccagttaaattccaggcaaagatatcgacaaactgttcctaaacccagaatggatgaaataagactgaaggagaacaaagttaaagacctcacacatctggatctgaacactcaccctaaagccacagtaatgaagagagcgtggcagtggtgaagcggttagacacatagataagtgggacagaacagagagcccccaaacagactcaagccaactgactttgtcaaacggacaaaggcaactcagtggagaaagagaagtctgttccacaaaagacaacagaacaattgcaaaccataggggaaagaaatgaatggagacaaaaaccttgtattttatccaaaaattcactcaaaatagtccatagacttaaattttcaagtgcaaagttgtgaaagttatagaagaaagccgagaaaaatatctgcatggccttggtttgggtgatgagtttctagatgcaatacaccaaaagccaacccacaaaagaaaacaaaacaataacggggactttattaaaatttaaaatggctgctctggttaagagaacaaaaaagcaattcacagactgattgatagaaaatatttgggaaacagccgggcaaggtggctcatacccataatcgcagcactctgggaggcca[133 bp omitted]ttactcgggaggctgaggcaggagaattgcttgaacccaggaggcagaggttgcagtgagctgagatcgcaccactgcactccagcctgggtgatggagtaagaccctgtctcaagaaaaaaaaagaaaatatttgggaaacacatccgaaaaaggacttgtctgcaaaatatttttttttaaaaaaaacctctaaaactcaaaaagaattagatgaacaacccaattgaaaatatgtgaagatctgaaaagacacctcagcaaagaagatgcacagatgccaaataagcatccaaattaattaattctcaacaaacttgtcctgagggaaaagcagattaaatgagatagtactgtacatctattaaaatggctaaaatctaaagaacagtagcaattgcaataggaggtctcattcattgctgggggaaggcataagggtacagtcacttcagcagtttttccaaaaactaaacaagtctcaccatctgatccaacaatctccttcttaggtatttagacaactgccttgaaaaattatgtccaagtaaaaaccagcacacacatgtatagaagcactattcataatagccaaaaattaaaggaatcatgacattcttcagtagctgaatgcataaccaaactgaagtatgcggtgcaatggaatgctattcagcaaaagaaaggcatgacctatccacccacgctacccggatggacctcacaggcacactgcttcatgagagagaaagtcatgacctatccacccacgccacctggatggacctcacaggcacactgcttcatgagagagaaagaaaggcatgacctatccacccacgctacccggatggacctcacaggcacactgcttcatgagagagaaagtcatgacctatccacccacgctccctggatggacctcacaggcacactgcttcatgagagagaaagtcatgacctatccacccatgccacctggatggacctcacaggcacactgcttcatgagagagaaagtcatgacctatccacccacgccacctggatggacctcacaggcacactgcttcatgagagagaaagaaaggcatgacctatccacccacgtcacccggatggacctcacaggcacactgcttcatgagagagaaagaaaggcatgacctatccacccacgtcacctggatggacctcacaggcacactgcttcatgagagagaaagtcatgacctatccacccacgctccctggatggacctcacaggcacactgcttcatgagagagaaagtcatgacctatccacccatgccacctggatggacctcacaggcacactgcttcatgagagagaaagtcatgacctatccacccacgccacctggatggacctcacaggcacactgcttcatgagagagaaagaaaggcatgacctatccacccacgtcacccggatggacctcacaggcacactgcttcatgagagagaaagtcatgacctatccacccacgccacctggatggacctcacaggcacactgcttcatgagagagaaagaaagtcatgacctatccacccatgctacctggatggacctcacaggcacactgcttcatgagagagaaagaaaggcatgacctatccacccacgccacccggatggacctcacaggcacactgcttcatgagagagaaagaaaggcatgacctatccacccacgctacccggatggacctcacaggcacactgcttcatgagagagaaagaaaggcatgacctatccacccacgtcacctggatggacctcacaggcacactgcttcatgagagagaaaggcatgacctatccacccacgtcacccggatggacctcacaggcacactgcttcatgagagagaaagaaaggcatgacctatccacccacgccacccggatggacctcacaggcacactgcttcatgagagagaaagaaaggcatgacctatccatccacgctacccggatggacctcacaggcacactgcttcatgagagagccaggatgcagaggctgtacgtccccacttatatgacatgctggaaaggcaaaacaacagagatagcaaactgatcagtggtgacacgggattcatggcggtggggatttgaagtactccatgtgatactttaactgtggatacctgtccctgtccacttgtgaaaagtgatagaattttaaagcccagagtaaatcataatgtatgcaagtggaattacattatttaatatgtgggaatatccctggatggaacacagaatgtgaccaagaatctaactgtatcacaaaagattaaaacaaaatccctgcagggcaaaacgtactgacctgaaaggtc[146 bp omitted]aatacaaaaattagctgagcgtggtgacgcgttcctgtaatcccagctacttgggaggctgaggcaggagaatcacttgaacccgggaggcggaggttgcagtgagccgagatcgcgccactgcactcaagcctggtgacagagtgagactccgtctcaaaacaaaaacaaaacaaaaacaattattgaaccattgtatctccacctggaatggagcagtgacttatgtaagtggcagatgatgggaagcaggtctctcactgctgaggtgggaggttacagattagcaaagggaggctacaatgatccatgtgataataaaccagaggggcaacatcagcatcaactcatacttagcctaatccagacaccgacagctccacatagaaatctcgataatcaggcggtccacataggttggaaacacacaggtgtttcctggcacgtcagctgtaagacctaaaggcattgaggccgcaggggcaatgagtgcattcagctcctaaatatagtttttcatgcgattctacagtgaaaggaaccagggctctttgaagaaatggcttcactaaaactaaggcagtaaaaacatgagcctggatgatcctgaagtatcaaaaagtaaggaactgctcagaacacagacacacacactctcaccccacacacacacacatacacacaagcacacacacacacagattatgacaaagaaaaaccagagccaacaagagctcccaatgacacaaatgggaatgaataaagcaacaaaatcctgtagtactgaattgtaaccaaaacttgaaataactctccaggtgtccacactggcataggtcaatgattacacacgtaaacaaaagtgggtgagagaaatctcctatgcagaaaaatcccaaataattgtagtggacactcagccattaaggaagtggcgtta[131 bp omitted]gcgctgatgtagaaattgcaggcaagttatccagatccagctaagacggttgatgaaaatggctacactaaacaacatattttcttttctttttttttttctttgagatggagtgtctctctgttgcccaggctggagtgcagtggcgcagtctcggctcactgcaacctccgcctccctagttcaagcaattctcctgcctc[134 bp omitted]ccctcccaaagtgctgagagtacaggcatgagccaccgcgcctggcctaaacaacatattttcaacatagacaaaatagccttcttactaggactttcatagccggggaagagaagtcaatgcctggcttcgaagctttagagaacaggttgactctgttcttaggggctaatgtgacttacagccaatggtcatttaccattctgacccagggcccttaagaatgatgcaaaatctactgtgtctgtgctctataaatagaacaacaagcctaggtgacagcacatctgtttaatgtctagtttatggaatattttaatctgactgttgagacctattgctcagtctgttgttgcccaggctggagtgcagtggcatgatcttggctcactgcaacctccgcctcctaggttcaagtgattctctcctgtttcagcctcacgagtagctgagactacaggcacccaccaccacgcctggctagtttttgtatttttagtagagacaggatttcaccatgtccagaccatggtgagaccatggccagactggtcgcaaactcctgacctcaggtgatccacccgcttcggcctcccaaagtgttgagattccaggcataagccaccacacctggccaagaaatacatattgtaaggctacagctgctacagataatgattcccctgatggatctgggcaaagcaaattgaaaaccttctgaaagggatgcaccttctagatgccactaagaacatttatgattaattcatgtgaggaggtcaagaatctcaacattaacaggagtttaaaaggactggactccaaccctcacgaatgactttgggggattcaagacttcagagaaggaaggagccacagttgtagtgaaaatagcaagagaattagaagtggaagctgaagatgtgagtacattgctacaatctcatgataaaactgaacggatgaggatgtgcttcctatggattagcaaagtagtttcttgagacgaaatattctcctggtgaagaagctgtgaacattgttgaaataacaacaaaggatttagattattacataacctagccgggcgcagtggctcacacctgtaatcttggcactttgggatgccaaggcaggaggatcgcttgagcccaggagttcaaaaccaacctgggcaacataggaagacctgtctctacagaaaatttttttacagattagctgggtgtggtggtttgcacaggtagccccagctacttgagagcctgaggcaggaggatagcttgagccagggaggtcaaggctgcagtgagctatgatcacgccactgcactccagcaagggcagcagagcaagaccctgtctcaaaaaaaaaaaaaaaaaaaaaaagaatattacataaacttagctgataagcagcagcaggatttgacaggatagactccaattttgaaagaagttctattgtgcgtaaaatgctgtcaaacagtatttcatgctatagagaaatattttctggaagtaagagtcaatcgatatggcaaacttcaaactccagaggggacactgctgatttcacatccattggaaagacttctttttttttgtttattttttttgagacagagtctcactgtgtcacccaggctggagtgcagcggtacccactgtagctcattgcagccccaaactcctgggctcaagcgatcctcctgcctcagcctcccaaagcgctgggtttacaggcatgagccaccaaacctaggaagacttcttgcttttttttttttttttttttttttttttgagatggagcctcgctccaggctggagtgcagtggcgtgatctcggctcactgcaacctctgtctcccgggttctagcgattctcctgcctcagcttcctgagtagctggaattacgggcacccaccaccatgccctgctaatttttgcatttttagtagagacagactttcactatgttggccaggctggtcttgaactcctgacctcaggtgatccacccgcctcggcctcccaaaatgttctgattactggtgtaagccaccgcgcctggccaagatctctttctggacactctccatgggacatttgctttttcacttcagagatgtggaatttcttgttccaacagtttctagtcagtaaaccctgtgactatcccaggcatgccacggccaaccccttccatgaaacgcttctcatgagaatagatctgggatctggcggccgcatctcttcccacaggtaactcttctgtatgaccccagctccaatgctgtctcttgtcctcagaatctgtaatttattggccttactgattgcaactatatcatccttacaaggcccacaagagcccgggtgacaggcactggtgtccttctctggggttaaaggtgcatctgcatgtgtctccttgtggatcaaggcctccatttcaactagtagatgtgagacgtttgctccaatggaggacagggctccaggtcacctcctccctgcacatgggcactcggggctagcccagcctcctttcccagtgggctactttccagtctcactcacaatggctctgagtgactctggaaagaagacagttatggaacctctccctgtccaagtcattctgctgatagatctgcataactcatctcagcgaagcctggaccgccttgggaagattacctctgcctctgtaattcagacaaagaatatgaggcgcagaggctgtgaccacgcaggtgacccagccccgtctgcagtagctgggattgaagctaagttctcacattcacagggtgccatgagggcctcctgatctcaagatccaaagtgtggctggcatttccattaacattgacacacatatgtgtgagcattttgatgtgtaaaattttgccaagtgtctcacatattatcttttatcgtagtcacagaattctgtcttcctcgatataaatacttgtctttttagagttgattttccatagagccagcagctaaaatattccaaatgtgtttttcaccatggttgtttcattgttggaattcatgttccattacgtggcaatgcatctctctctgctgctctcccacctgagcagcagccaggctaacaatacgccgggggcacgtctcctcctgagcggcagccgggctaactatacgccgggggcacgtctcctccaagggaagaaaacacctggcaggacgtgacattctgaactgtgaggacttttcggggggaccaaagtttctgaaggtggcagtttgtgtctcagtctccatggggtccagaattgaccacagagcagaaggcaacagggagccactggattcacggggtggctttaacgtttaagctccgacataagaagtcacgccctccctgcgtttcaatgtccacaaataccataaaccacctgcataactgtctaggagtttcaactcatcgtccaacgtctagaggaaggtgctttcaaatgtttataatagatcaggtcaggatgtggactaggatgttttatcaattaattaattgattgattacaaaatgtaagtcttttaatctgaaatagggctggagaatttagcaaagtattatcaattccacatgagccttcaaagatcagttgtgccatctgcctctcagtaagcattggcatgtgacgtttctttcctaacatggggtttaatttcatttagctactgttccatccattcataatttgaaaatcattttgtctttagaaaaaccgtactactggccaggtacagtggctcacgcttgtaattccagcactctgggaggctggcaggaggattgcttgagaccaggaattcgagaccagcctgggcaacatggcagaaccccagtctctatcaaaaaaaatataaaaattagccgggcatggtggcgtacatctatacttcccgctactcgggagtctgaggcggggggatcgcttgagcctgggaggtcaaggctgcagtgagcagtgattgcaccactgcagtcatgcctgggcgacagagccagaccctgtctcaaaaaagaagaacacccacacccctccaaaagcatactattaccttttctattagatatctcaactgctgtacatattgctcaaagttatgacaaaaatctctcatgttgtgttgtggattccctgaggtgcagcctgcggtgtggccctggactcaggaaacccctgcagggaagctgtgttgcttgtccacgtgtgggcggggggaggtttccagccagacaggtgagcacctgcagcgacaccctcccgtccacacccaccctgccctgaccccaggcgagggccatggaatcacaggtaagtcttgtttactcggtcatcatctattcattcactgggctaattcattcataaattccattgctggaacctcataattccaaataacctaagcttccctctgctgtgcattgccctcaccacatgccttgcctggtctgttcattcttcctggagattccctgtccttgtaatgccattaaaatgtctaaactaggctgcttgcttataaaacagcaactcaaagtaaaaacaacaaacaaaactaggcttagatccaacaaatcacaactgttcaaaacaaggctaacaaaatgccgcagctcgttacgtctcagaaatgggaagtcaagaggcgaagggtgagacctgggagctgtccagctcctgaaaatacgcagcgggagactgaagaacaaagattccctacattgcagacaacgtgcctcttcccgtcgtaggaggtggtcagcagctgagagcacggggggcagacattcaggcttggggctcaacaagcctctgggaaaacacccagaccaaccctgggggctcacagacccccaaatccccatcaccaacgcggtccagaaggccacaggccacaccactgccgtgtgaagtcaaggaaacactgccttcttgcatcaggtcctaataactaacgttaaaagtttaaataatgtggccgggcacagtggctcacgtctacagtcccagcaccttgggaggccgaggcgggtggatcacctgaggtcaggagttcgggaccagcctggccaacacggtgaaactccgtctctactaaaaatacaaaaattagtcgggcatagtggcaggtgcctgtaatcccagctactcaggaggctgaggcaggagaacggcatgaacccgggaggcggaggttgcagttagccaagatcatgccactgcactccagcctgggcaatagagcgagagtccttctcaaaaataaataaataaataaatattgtcccactaaaagtaaaggtaatgacattttgaacttaggacaattttctcaggcagagttttacttttttgacttaagataaaatttttcaaagagtagcttagtgatccccacatacacagcacatagacttaacagccactaatattttgccatgtttgattcatgtttttgtgttatgaaatattgtaagttgcagacatcacaaaatttcactcctaaatacttcagtatgcacctataagaaaagtaaccacaacagtgggtgcggtggtggcgcctgtagtcccagctgctcaggaggctgaggcgggaggatcacttgagcctgggaggtcaagcctgcagtgagcagtaactgcaccactgccctccagcctgggcaacagaat[136 bp omitted]cccatctctactaaaaatacaaaaaaaatcagccaggcgtggtggcgggcgcctgcagtcccagctacttgggaggctgagcaggagaatggcgtgaacccgggaggcggagcttgcggtgagccaagatcgcaccattgcactccagcctgggcgacagagtgagactccgtctcaaaaaaaaaaaaagtacgtatgatttcctacaaaaccacaataacatattgtagctaacaagctcaaaaaaatttctgcctctcatcaaatactcaggagtttttcaaaaaccaattagcctcagaaggtaggagaaatgccgggccaggaggacatcgccatgggaaatgatatttacatggctaagaatctgagtttcctgtgagaaacaacggaaaaaataccctccttgtacaatgagagaaaatactatttttttccataaaaccataagggtgtgggcagtgtaaacctaaaattatgcacgagagcttccccatcgctctgtgtgggtagagaaacactccagcgtgtctgctctcttggtgctgggaatctgtgagaattcctgagcccgacacacagcgtctcggcttttctcatcagatgcagaccagtgcatgcatagtccagctgggcagcacagaaacagcgagaggccactggctcccaaaccaaagctgggcccttctggctttggaggaccctctggggatggctgtggtcagcacagctctttccttctctgctctcacagctgtggtgccggtggtctttgtgaagcacggagactcccccagtcaaggccaacggctggactcagctgcgtcatctccctcaccccgagcttcctctgctccttactcttcactggccgtcccaacacggccacctgccccccagcaaaccacatgagtcgtgtgcactgtagctgcgtccacagacttgccctcatccctcactgtggtcctggctttcaaggccattgcacctgggaggagactgaggtgttggctggtgtcagggcctctgcatctttcccatttgctcctgatccaagtgactctgtctgcggggtctggctgggaacctctcccccatccactgccagaggctcacattctgagcccagatacatcctggtagtctgcgtcctgggatacctgagctccttggccctgggaagcttcagtgtgactttcttggccaggaacctgtctgacacctgcgtggagccaagtccctgacgttgagcgagagttctgcagtgtctgggtcaccttccttcccatccgccaagggcaggtctcctccatcttggcccctagggtggggatcccaggctgcatctttgccccccgccctccccgcccagtgctacattaccctcaccgtaggctcaggcctgataggaacatcctgcaagggccggggaataagatacttaagttacccactttaaaaagacaaatttaccctttttactctccattgaaaaagtaagctctgtatgttccgtattcatttcagggcaaccagcccctgaattccctgtttcagaagtgtggcccccaggtgcacaggggttgacatgaacagaggggaggggttcgggccagagagaccagctttgggcctaaaggacacagggactggacgaacctgtggaaggggttcagaagggggctgaggcgtcagctccaggctaaaatcctgtgtgtggtccttcaggcctgacaacaggctctaccggcggacctcccagggatactgccctccccacccagactcaggccctgggggcgtccagccacctgctcactcacaccacgctctcagctcaagtgcctctattcagaagcctctactaggaacgtggggcaggggcctccccgagggaggctgggtccttcaacctgcagcagccttttgtttaggcccctctcagcagtgaaatgaccctcgtgtgtgctgatccacctgacccttgaccccagcactgtgctgggagaaacgcaaggggcgggttggcttctggcttctaccatcacagcaggtgagtttgcttgatagctgagctgcgctgagcccagcaggggagccctcggatgtgagaaacacagtcccagaacggccataaggaacagaagcactgagaccgtttgtgaaacaggtgccctattttactaaaaaccacatatacattacattttacaaaacagcaactatctgatctctcggtcccttccttaaccccataaaaagaaggggatatttggggaccgacgggaacaggttcccctccaaatgctgagggctacccaggcatctccagactcctggtccagtgcagggcagggggcagcggagcccgctcactgctcccatcagcccagggttcctggagcccgtccagagccctcagtgcctaaccagggctggagggaccacctgggtgggcctcagctggactcacagcagctccctgcctgggcggggtccggcctcaggaggaggagtgcgggtatccatagtggttgtggtcagcctcgcccagggtcaacgtcagtgacaggctgggcttccgttccagctcctcctccttcagacagtgctgtgggggtcgggctttgaagaagtctgagatgtagcagacctggtagagcagagggtggtgagaatgggcagggggctgtccaggtaccagggacatgggcatgagcaggagggggaggaacagggtcccaggtgggagcgaggggcctaggtgggaaatgagaggagtagtgcctggggtgggaagagagcgctcttagtggaggaccagtggggagcactgaggagctgacaggccccgggaagaactgcagtagggccaggggtccagagaaggactggggtgcacggaaaggagtcctgtgcactggggtgcaggggaggaatgggggcatggaggggggtccagggaaggactgggattggggggaaggggtcccaggggaggactttgggggtaatgaagagggtccaggtaaggactgggactggggagaaggggtccaggggaggactggggggaaggatggggtaaagggaaggactggggttgggggaaggggtcccagggaggactgacagggaggaggcccaaggaaggactcagtggggcaagggtacccagggcagcactagggttggctggggagtggtctctggacaacacaggggatagagttagggttagaagctcacagtgagggcagccaccagtgccccctgcaggaggccaacaaggacatcgctccagtggtgtttgtaatcagacacgcgggtgtagcccacgtagagggcaaaggccaccaggaagaactggactgtgggtcgcagcagccgtgcccacttccaacagagtcgtgcctgcacatacagctggagtggggagaggacgtgttagcctgtgcacctgccaggcgctccccctccccctgcacagacgtgttagcctgtgcacctgccaggcgctccccctccccctgcacagacgtgttagcctgtgcacctgccaggcgctccccctccccctgcacagacgtgttagccttgcgcctgccaggcgctccccctccccctgcacagacgtgttagcctgtgcacctgccaggcgctccccctccccctgcacagatggcagcactgaggccggaggcaaacactggtcagcccagggcctcccgtttttataaacaaatcagttagcccccctcaccaccactacccacccattttacagctggaaaaactgaggtccagggaagggagtgatttagccatggttcccccgaaaagcaagcccgggagaaacagactcaccgccaagaacaccatgcagtacatcccaaaggaagagtgtcccgagtagaaagacaacctgaggaaggagaaggggcaggtggctcactcagcgccttccaacctcccccttgtccccgccccgcccacagaagggagggctcgacacggaggctgctgctgttagatgcactcaaatcccagtagcagaaactgttccccttttctgttccagtcatctgataatggaataagagtctctgactggggctgtggcatgagatgcctcatccgtgaagactctgaggcctgaacccaaaacccagggcagacaatcatgtctggcaagcaggcaacaccacagtttcattttcaccatgtttcttttcaggattttctcccatctgcggaactgagggaagacttatttttatataaattcaagattcggtgaaggacatcaagaaaatagcagagcaagaaacttcaaaagcaatttttaaaaatggcaaaaaagtcacaatcaacttttttggaactactcaaaagcttgcagccaccagaagacttatcaagataaaccagctgaatctcagaacaaacggccttgtcgcattttaactcatcctggtccctctcccactgcctagactggtggtggcctgaggattccaagaacagactttatttgcaactgtggacgggagtatggctcaagggctggccttgatctcacctgactggacattctcccagtgctgaggtgctacctgggggatatttgtaggaaacattcacaacaaatttattattctctgctgcctggggccacagacagcagatgaggcaaacaacagactaaccaaacaggccagggaataaaatgctctgggcgatgggggcctggaacgcagacagagctgtgcaggagctcaggagaggcctgcgagggccgaagctaagctctcacgtctggccgccttcaggctccgcacacacaggaagcaaaagctaaggcagagttgaaaatgtgtttaaccgcggaagggctgaccccacatgcacacagacccttctacaaactctgggagggttttatgggtttttttgattccagatgtttaaggaaatctctgtcctatcactgaccactgggctaaaagaataggaagaaacggccatacgtgacaaaaaatacagactttacaaccagaaaagtcattaaacaaataactactgcaacaaacagcaagaacaaacccgggagagggcgtaggatcatatttccagagttgctacattataatattctaaacacccagtttaaaacaaagcaaaacaggccgggggtgcggtggctcactcctgtaatcccaggactttgggaggccgaggcaggcggatcacgaggtcaagagaccgagaccatcctggcccacacggtgaaacgccgtctgtaccaaaaatacaaaaattagctgggtgtggtagcacatgcctgtagtcccagctacttgggaggctgaggcaggagatttgcttgaacttgggaggtggaggttgcagtgagccgagatcgccactgcactccaacctggcaatagggtgagactctgtctcaaaaaaaaaaaaaaaattacaaggcatgtagaaaaacacaggtgtggccaatacacagggaaaaaaatgtaataatagaaattgtccctcaggacacccagatgttggacttactagacactttctaagagagggcctgacttgaacttctgggctccagcgatcctcctgcctcaccctcccaaatagctgtgacaacagttgtgtgccaccaagcctgggttctagacaaacacttttagttagccatttaaaatatgttcaaagaaaaaagtaaaaataaataaatactatgttcaaagagccaaaggaatatgagaacaatgtctcaccaaacagagaatatcaataaagagaaagaagttataaaaaggaaccaaataaagatttggttatctgaaatgaaaaatcacttgagggaggctcaatagcaggtctgaggaagcagaagaaaaaagacaatgaacttgaaaataggtcaattggccgggcacagcggctcacacctgtcatcccagcactttgggaggcagagacgggcagatcacaaaggtcgggagttcgagaccagcctggccaacatggcgaaaccccgtctctactaaaaatacaaaaattagctgggcgcagaggcacacgcctgtaatcccagctactcgtgaggctgaggcaggagaatcgcttgaacccaggaggcagaggttgcagtgagctgagattatgccactgcactccagcctgggagacagagcaagactccaactcaaaaa[144 bp omitted]tctacttaatacaaaaaattagctgggcatagtggtacacacttgtaatcccagttactcggcaggctgaggcagagaatctcttgaacccgggaggcagaggttacagtgagccgagatcgtgccactgctctccagcctgggggacaagagagagacttcgtttcaaagaaaaaaaaaaagattattcggctggggccaggtgtggtggctcacgcctgctactcaggaggctgaggcaggagaattgcttaaaccgaggaggcagaggctgtagtgagacaagatcacgtcaccgcactccagcctgggcgacacagtgagactctttctcaaaaaaaaaaaaaagaaaaggagaaaaaaaacattattcagc[138 bp omitted]atgatgaaaccccatctctactaaaaatacaaaaagttagtcgggcgtggtggtgcacgcctgtagtcctagctactcaggaatctgaggtaggagaatcgcttgaacccaggaggcagaggttgcagtgagccaagatcacaccactgcacactgcactccagcctgggtgacagaacaacattctgtctcaaaaaataaaattaataaaagtaaatgaaaatacaaaaattagccgggcgtggtggcgcacacctgtaatcccagctactggggaggctgaggcaggagaagcacttgaacccaggagatggaggttgcagtgagccaagattgcaccaccgcactccagcctgggcccagactctgtctcaaaaaaaaaaaagaaaaaaaaaaaagattatttaccctgaacgggctcagtggctcacacctctaatcccagcactttgggaggctgaggcgagaggattgcttgagcccaggcattcgagaccagcctgggcaacatggtgagaccctatttctacaaaaaaatttaaaaaccagctggatttggtggtgtatgcccgtagtaccagctacttggaaggcagaggtgggaggatggtttgagcccaggagttcaagtcctgggcaagatagcaagacccccatctctaaaagaaaaaaaaaattaaaagcaaaacaaacaaacaaaaaaagacagtaatgaggaattgaaaaaagaagatataacctaagcaaacctcaacgaaatgacagaggtccttccttatcagtaattacattgaatataaataaacactccaattaaaagtcaaagtttcattaaatgccttaattcaataaaaagattaatatataatttaaaaaacattaaaaaaaaagtcagagatctggctggatgtggtggcatacacctgtaatcccagcactttaggaggccaaagtgggcggatcgcttgagctcaggagttcaagaccagcctgggcaatatggcaaaaccccgtttctaccaaaaaaaaaataaacagtagctggatgtggtggcacgttcctgtagtcctagctactcgggaggctcaggtgggaagatggcttgagcctgggagtccgaggctgcagtgagctcagatcattgcactccagcctgggtgacagagtgagcctctgtctcaaaaaaaatcagagattggacaatacattaagaaacatggcccaatttcatgctaggtataagacacttactttacagtcagagacataaacaggttgaaagtccaagaatggaaaaaaaaaatattccatgcaaacaataacaaaaagagaaccagaatagctatgttaatatcagacaaaacagacatcaagacaaaaattgttgagacaaaactcatatatctcattctatgatgatgaaatggtcaatctttcaaaaatatataacaattacaaaggtaaatgtactaaacaacagaaccccaaaatacttaaagcaaaaactgacagaatgttacaacatggatgaacttcaaaaacatacaagaatgcactaacttatacaaaaattagccgggcgtggtggcgcacgcctgtagtctcagctgcctgctggctcttcatgatttggctccagggccttcttcagctcccattccccacaagagtgaaggctgctggtccacacccacctggcctcggtgacatcagcagggtttcccctgcacaccttctccagctgcacatagaccgagcagttgacccggctccagtcggggtcgcagacggctaggaagttgggcctcagacgcccaatcatgtacttggccaggtctgtcagagactggctcacggcagccccaaacaggaaggtccccagcaccttgtatacagcagccacgtagttgttgaagtccgagcgagaatagagccggtctgtgtacaccaggtaggcttccccggccgagacctgcaagagcagccgcaggaaccagtgggggtctcggtcggcccaggggccctcactcctccgcacgggcctccccaaggctgctggagagctggggactctgaagggggccctattacccacaggtaccactcagggcaaggctgtgtcccccggccccacacagacctccagggcagggctgtgccacccccccatcaggcccccagggtaaagctggccccaccccatccccctacccagtccctctgagcccctcctgccttacaaggatgacggtggccgtgatggtgaccccagccatgagcccgtgggtgatggtatctggacggtaggggtaccggatggagtcatccccgcagtaaaatcctcgcttgtacggggcgttcaccagcgtcaggatagcgaagggcagggaggctggtggggaagaaaagcctgggagctgtgaggttctctcaccagctgggccttggggccccacacacctgccttggcctggaggcctcccacctctactctcaccagacagcaaggaagagcttttttcacagcccaaataacactccctttcgcatcccctcagacaaacacaaactcctcaggcgctctgcccctcacatcctggcagcctcctttctgctccttgaactaactcagcaaacacccacctttgcacagccacttctctctgcccaaaatatcttttttttttaaatttttaaaagtagagacaggggtctcatgttgaccaggctggtcacaaactcctgggctggagcgatcctccagcatcagcctcccaaagtgctgagattacaggtgtgagccaacgtgccaggccccaaagtatctctaatttatgtgcggggccccaaagtagctctgagtaacctccactctcatctcccctgctgactgtccatgccagcatccctctcacagaaggaaaggtctgctctttttccctcttccttatgcaaacctcatgtggaatttggcagtcacgtgtgggacactggaattgatttccccccatccacccaccggcaccaggaggggcctaccgtattcagggcagagtccctggagcctgctcagggcctggccagggcagatgtttaataaacatcggttaaaataaggcaggacttcttttaacctaagagcaggccagagaagtcaggaagaagccaaggaagggcacagctgagacaccttcgctcacgcacttgccccttcatcgaccagccacgtggtgaccaggacagacccagccctggcctcagggatcaaagacacattcaggagccacttatggaaggtgctgccatggcactggggctcctggggccctgctgagctgagggtggccagggaagcaggagtcatctacggagaacggggcagagggcaggcgcacaacaaaagcccgggtcggctagcccagagacaaaccaaggcagggcatcctttggcccagcagggcaagtacaaaagggtgtggcttttctaagttctgaatgtcagcggaggggcagggagccccacactcctcccgacatgctaactccaagggccctaggacaccgtacaccttccatgctggctaagtctggggaaataatctggtgaagaaaacagaggcctgcctcaccgagcaagaaaggtgagggaatgcagaacagaa[137 bp omitted]cggtgtcccagctcctcgggaggctgaggcaggagaatcgtttgaactcaggaggcagaggttgcagtgagccgagattgcaccactgcacaccagcctggcgacagggcgagactctgtctcaagaaagaaaaaaaaagggcagcgccagggcctggaggcagggcaggacggcggagagggcgggatgtaagaacctgccttctgctcccacacaggaggggctggagctgctgtgaagggagaggccttggaggaggctcctgcagttgccggccgggtggaaagtcagggttacgagatgcccagaagggagtgcagcccgaccacagctcttatcgggcggaggctcacacaggttagcctccgtttccgacctccctgccccagcaactccaactagagacgcaggcacccccataacgacaggcgccgggcttccctcggcctggaaagctctccctggggtccccaaaacagacaccttctcttcatttagcccccgggagccctcccgccctcacactgccctcatgccagcatctggaacctcagtgttgactgaactgtggtgtgctcaagcttccagcatagaggtgcactcggcctggccaccacccctggcacacagcagcaacagccaaccccatctcggctgtacctcccgctgctgtgtgacctccggcaggtgactcagcacctccctcacaggctgttgtaagggaaatgtttgttatttgcatgttgcttagttcctggcatacagaaagtgccacctaaatgtttacataaataacaccataggtgctcaggaaatggtaccacgggctggcagacacccacagggacttcttgctgtcacctggcccaccctaaaaaagggtctccttccggaggtaagaggacttggcctctgctgtgagatggcagagaagcaggaaacacgttggggaggagggcaccccccagagatagaattccagggccattgtctgtgcagccacagagcaaacactcggcctttgttcccgggaccctgcgggaggggggcctcgggatgcccattccgccagtgtggcccgcaaacccgccggacaggtttggttctcctggcctcccggccccccgccaccccgttcacccgaagcctgggacccagccttcatccccagtgtctcccccgcccgagccagcagggcggctgggcctccccgcacgtgcacgggttcgaatcccgccgacgcaccgggtgccaggaccgagggtcagccctctccgcgcgcagcgggagcgcccaccccaggggcggaggcgcggacgtcctgccggggtaacccgcggccgcccccacctcccgggcccgcgtgactcacctcccaggccaggcggggcgggatggaggcgcgcgcgcggcccctccgcacagacttcctgctgccggggcgggggatgctggccccggctccccgggcctctcgcgacccccatccccctgggcctgggacgcggggacccccgagcctgggagggcgcgcgcagtgcggggcgcggagggaggtctggtcctcacgcgaggtccccgcctccagggtcctcggagggacgagggcgcgcagcctccgcgttcccctgcaaacttgcgcgcagccgggggcgtgtccgtcccgggagggtccccccaacacccgggtccccaaggctcttaccgaccagtaagcacagcacgtcgagcagcacgaagacccacctccgctgcatggtccccgcgacccccgacgccggtcccagcgcgtcccgtcgcgtcccggcccggccgcggagtcacgtggcgcggagcccgccccgcgcggagaggaggggaggggcgggaaggggaggaggggaggggcggggagggcacgaggggagaggtgaggaggggaggggaggggaggagggagggttaggggcggggaggggaggagggagggggaggggaggaggggagggctaggggcggggaggggaggggggagggggagggaagggaagaagggggggaggggaggagggaggggggacggcagcggcgggcaggggagcagcggggggggcggggcgcggcggacccgggaccgcgcggactctgcccccgcctggccgcggcgcccaaaagagcgggtggggcgagcgtgcgggcgccacggggacctcgtccgcccggagtcccggccctgacccgggctgtgcgggtctccgagcggcgtgaggtcctcagaggctggaggttccccgcgggtcgggccggcggagccccgggcggggacgtggagaaggaggacgagcagcggcgggaccggccccgcgggacggttcccgactttcctcctcagggagtggcagccgcgccgtgtgcgcctggaaactccgacagcaggaggcaccttaaagtggaaggggcgacgtggcttcatttcaggagtttcttttctcctaatactcaaaatcctggcgcgtccttggacccctggcacgttagaagctcgagttcctcggcacccaccttgcgacggcgtagggtgtccaggcgcagccctgtgcccaggcaccgttcctatcagcgcacttgctgtcccatttcacagaagagcacgggggcgccaggagctgggaaccccatgaaatggcgccggggtctgtgcccccaccaggtcgtggggagccctgagctgagggtgcctggggattgagggcacctgagccagggaaacccaggcccaagggacccacactgggtcctttcggctgggaccatccgggaggcctcaggagtgtcagacccacgtttccggagtccagccttgacctctgccactcacggtcacttaaatgggaagtggcaggcctggggtcagaaacaaggctgctgggccccagatccgctgccaccctgaccctcctctaaaacccgttcagcaccaccatcagccccctgccccagcaacaccaaaacagggtgcgtctcagcaactggacttcaactgggagctcctcgaccctgcttcccggatggtcagacacctgcacgtggggcaggggggcatcatgagggaactccaagggcaaggggctcttgggagacagcaaaggcacccagagtggtgctgggtgggaagacggtgcaagctgacctgtggccctccaagggcagggttgaggtgctcccttgctgcactcacggtggggtgggggggctctagctcccgtcggaattaggattgtgagggttctggtgcctagcatcaatgctacataaatgtagggttcagcgtcactactgcgctttcccccacacttcaccctgtctgcaaatgagtgaccactgctgtcagtgtagtcttgacagccaacgcacattttctcctaagatggagagggtgcaacatctactggagtcaaggaaaggcggtgttcttcattgagcacctactgtgtgctggggagcaagggagaggtcacttggaggggcctgccaaagtgggagcggggggaagacagtgggggctgtgggatggggccaagccaagagggagagacccaggagaggggtggaggtagacctgggaggatagagggtggaggtgaggctgcaggctgttcccccttccatccttccccttgggtcaggatttgggttagcccttaaaatccctgggcaggataaggattaaaatctggtggggaaagcaagaattaggattagggtcaggattggggtcgtctcctacatatgctgactgcagcccaccacacttcaaggaacttcttgtcacggctttcatagctggatctgctgctgcccccagctgcctggtcctcccttccaggaagaacctgaggccagggcagctcccagcagggacagagcctggcctggaggccaggcctcagtggctttctccttcacctgcaaatagcagagctggaagcgggtggtggtacatgtacccaggctgggtcccctagagacaagcaacccctgagggccaggtcgccactcccaggcaagcaagctcacgggttcagcaactgcagctcccgcctcttgcccagcactggctctgccaccttggtgcctcatcgcaacctggatggctccgggcctgtttccaaatggactctatggagactaagacacctgtgaagtgggcagaagggggcctggcacacagtaggtgccacctaagtgcagccagccactatacctgccgttgctttctctgcttctctgggacttgagaggtgaagtaccttgcccagagtcaaaacgggagttgtctcccaggttcctggcacggggctcttggagtcgaacgagtgcccgtcagtgggtttgacgtgcaggcagtgggcagggaaggctgagggggtggatggtttggaaagacatctaaggtatccctcagtctctgtctgcataaaggcggcaagacagtagctaccacctgggattgtagagaagattaaatagtttgtgaaatgcttgacccagggccaaacattaggaaacatcatttgagggttaattgaacaaaatacagtgtgggtaggtatcacgtgtttgctgggtcaagatgtagaaggtacttcttcctggggtcaagatttaaaagggttggaaaccgctgccttcaaattcacaatccaggacccacgaattcaaaattcccctcggactttgcaatccttggagtgcctcttaatttagtgtaaccttacagtcagtcagggacagggtaaccctccgggtttcagcaccgcgagtctgctgtgctctgtctgtgaggaggtcttcactgggtcacagcaaagaaaaacacacagcagtagtgctggacgtggtcgccagagcccctcgcgcagacaagccgggacgcggcccccctgccagagcccctcgtgcagacaacccggaacgcacagcccctcccaccatctcagtctgtgcgttcgttcactgtccccgtctcctcccacgagctccaggaaagtgggagctggcacacagtgggtgcgcaagccgtgcttactgggatgcccagagcctgaggtcaccagggagctgacagctgcagggagctctccctgggtcacagcaaggcaagacacacaagcaacagcggagggcaacagtgcgttctcaaagggagagctggtttccgcctgcttctcgtacaaaacgaggggcagagatggcaggggccaccccgcgaaacactcgattaaatccccgttcacaaaccttcctgatgcctggcagccctatccctgcccccgaaaccagcatctggtgaaggcaaggagaggcacctggaagacctcaaatctttgcaggtctgcaaagccactgagcacccacagaccccaaggacctggttccgactcaaggaagaacaaggacggtggtggcggaggggctccagagaactcgtaatgcctctggtgaggccaccgccgtcctgcatctcttgatgtgactggtgacagcccaccagggcggggaaccggttcacctcccaagtgctcaccgggggccgcgctttcgactctccctgcacaggccgtgggtcgtggctccgggtgagtggaaacatttgccccgcagcgaccaccgcccctccctccccgacctcgagccacaggaccaggggacggggctgggctgcgctctgggccccgcgatgcctccgggaggcacggccgccctctgctggacacgccgaggaggcgctccacgccagggtctcaacatcctcctgagaacagcccagcaatggggcaaataaacatcaaggaccccctagctgagtcctgatacctgtgaaacaaacaggacaccccgttacatttgaatcccagaagagcaacaaaccggttttcagtatgtgtcccgaatactgcatgggacatacttacacattcgtttatctgtaatccgagcccaactgggcatcctgtattttatctggccatcctacccaggaactacaaaccgagaaaacaaggaccatcagggagagagaaacagctgggtcaggtcagtgggggcccagacagcgccagtccagggcccggacatcttcaacaaagcctgggcctgggaggctgaggctctggggaccgtggccggtccaggaccatcagttctgagcgactttctccctcccccacttccacccccacagaaattgtctcaggagggctgatctccaggcaggcccctggctaacgcctgcttcctggcacggccatggactctgtccagaacagatttccatatttggttagcaggtaggaaggaggtcatcaaagaccttcacttcactgtaaaaggaaagcattaaataaacgaacacaaatgacttttatttatggctgccgaaaagctgaggacagtaagtttgttctagagaggtatgagctcccctgaggttagtcaagaccaagtctggtggaggcctcattagtcctaggagcctggtgtcagacaaatccggaagagccccaaggcacagcgggccctccaggtcctcctgcctgggtctgggctgcaggaagggcaggattccaccaccccacagctaacccagaggcaaagctacgctacacaagcggtgagcaggccagcccagctcctcgagaccagcacatcaacccagctgctgacaggagaggggcaagcccttcctgaggcaaaacagtatcccctctgctccttaactgtcttacccacatctagtgcaccctcagaaacacaagacaccatggacaagaacagaatattagtcaacaatggcatcccagggtctctcccagctccaacctatcttagatattccagtcaaatccaatctccctaaagcgtgactctacttcagctaaaaaacacactaaggctccccactgccttcccagtttcagatttcttggcctaagagggaagttgttcctgcactgccctcctgacctctgtgctcaccccacacaaatgggacgctcatgcctctgggtggctgcgcccggcctgcccatgtgctcctccctcttactattccttctccatggggcctgccctgctaccgaaggggaacaagggaccctggcctggccaaccaggaaaccccttctgctcggcagttcctgattcagttatgggcacgagacccaagaacaaattttacccaggagttttgttagaacagttgggcaagatacaggcttcccacagaaatcacagatgtaaggttgtgtgcctggagcttctggtgccatctcagtcgccacaaagggcgctgcccctgagaagaaggtcagttcgggcagcagagaaatagaagcaccgaaacatcataatgtggatggtgactcctgattcctgtttctggaggccctggcatccccggactgggtcttaagagtataactttcgggctgggcacagcggctcacgcctgtcatcccagcactttgggaggccgaggagggcagatcacaaggtcaagagtttgagaccagcctggccaacatggtgaaagcccgtctctactaagaatacaaaaattagccgggcgtggcagcgtgtgcggtgtggtggtgtgcgcctgtaatcccagctactccggaggctgaggcaggagaatcacttaaacctgggaggcaggggttgcagtgaactgagatcacaccactgcactccagcctgggcaacaaagcgagacg[153 bp omitted]tctactaaaaatacaaaaactagccgggcatggtggtgggtgcctgtagtcccagctactcgggaggctgaggcaggacaatatcacttgaacctgggaagtggcagttgctgtgcgccgagttcacgccgctgcactccagcctgggcgatagagcgagacctcgtctcaaaaaaaaaaaaaaaaaaaaaaaagcaaagcaataggatgacaatgatttaaagtaactattattaaaaggttaaagattacagaagaaaagataggggcaaggtgagaaaatggagaatttcagcagaaaaattaaaaacacataagagcacctattaaaatatacaatatgggaaataaaaattttgtgaaacagactaaatagaaatctggaatatcagaaaagaggattggtagcatcaaagacatgtcgatagaaattattcagaggccgggcacactggctcacgcctgtaatcccagtactttgggaggccgaggcaggtggctcacgaggtcaggaattcaagaccagcctggccaatatggtgaaaccccgtgtctactaaaaataaaacaaaaattagccgggtgtggtggcgcacacctataatcccagctactgggaaggctgaggcaggagaatcgcttgaacccaggagatggaggttgcagtgagccgacatcatcgacatcatgccactgcactccagcctgggtgacagagcaagactccgtctcccaaaaaaaaaaaaaaaaaaaagaaattattcaaacagaagcacagagagagagaaaaataaaagagagagctgtgaggcaacaccgagggttgtaacattagtgactggagagactgtgggtcacccatggccatgacaccagtgactggagagactgtgggacacccatggccgtgacaccagtgactggagggactgtgggtcacccatggtcgtgacaccagtgactggcgagactgtgggacacccagggccgtgacaccagtgactggagggactgtgggacacccatggccgtgacaccagtgactggagggactgtgggacacccatggccgtgacaccagtgactggcgagactgtgggacacccagggccgtgacaccagtgactggagagactgtgggtcacccagggccgtgacaccagtgactggagggactgtgggacacccatggcagtgacaccagtgactggagggactgtgggtcacccatggccgtgacaccagtgactggagagactgtgggtcacccatggccgtgacaccagtgacagtgactgtgggacacccatggccgtgacaccagtgactggagggactgtgggacacccatggccgtgacaccagtgacagtgactgtgggtcacccagggccgtgacaccagtgactggagggactgtgggacacccagggccgtgacaccagtgactggagagactgtgggtcacccatggccgtgacaccagtgacagtgactgtgggacacccatggccgtgacaccagtgactggagggactgtgggacacccatggccgtgacaccagtgactggagggactgtgggtcacccagggccgtgacaccagtgactggagggactgtgggacacccagggccgtgacaccagtgactggagggactgtgggtcacccagggccgtgacaccagtgactggagggactgtgggacacccatggccgtgacaccagtgactggagggactgtgggacacccatggccgtgacaccagtgactggagggactgtgggtcacccagggccgtgacaccagtgactggagagactgtgggacacccatggccgtgacaccagtgactggagggactgtgggtcacccagggccgtgacaccagtgactggagagactgtgggacacccatggccgtgacaccagtgactggagggactgtgggtcacccatggccgtgacaccagtgactggagggactgtgggacacccatggccgtgacaccagtgactggagagactgtgggtcacccatggccgtgacaccagtgactggagagactgtgggtcacccatggccgtgacaccagtgacagtgactgtgggacacccatggccgtgacaccagtgactggagactgtgggacacccagggccgtgacaccagtgactggagagactgtgggacacccatggccgtgacaccagtgactggagagactgtgggtcacccatggccgtgacatcagtgactggagagactgtgggtcacccatggccgtgacaccagtgacagtgactgtgggacacccagggccgtgacaccagtgactggagagactgtgggtcacccatggccgtgacatcagtgactggagagactgtgggtcacccatggccgtgacaccagtgacagtgactgtgggacacccatggccgtgacaccagtgactggagagactgtgggacacccatggccgtgacaccagtgactggagagactgtgggacacccatggccgggacaccagtgactggagagactgtgggacacccatggccgtgacaccagtgactggaggctgtgggacacccagggccgtgacaccagtgactgcagagactgtgggacaacacccagggccgtgacaccagtgactggagactgtgggacaacacccagggccgtgacaccagtgactggagggactgtgggacacccatggccgtgacaccagtgactggagggactgtgggtcacccatggccgtgacaccagtgactggagggactgtgggacacccatggccgtgacaccagtgactggagagactgtgggacacccatggccgtgacaccagtgactggagggactgtgggtcacccagggccgtgacaccagtgactggagagactgtgggacacccagggccgtgacaccagtgactggagggactgtgggacacccatggccgtgacaccagtgactggagggactgtgggtcacccagggccgtgacaccagtgactggagagactgtgggacacccatggccgtgacaccagtgactggagggactgtgggtcacccatggccgtgacaccagtgactggagggactgtgggacacccagggccgtgacaccagtgactggagagactgtgggtcacccatggccgtgacaccagtgactggagagactgtgggtcacccatggccgtgacaccagtgacagtgactgtgggacacccatggccgtgacaccagtgactggagagactgtgggacacccatggccgtgacaccagtgactggagagactgtgggtcacccagggccgtgacaccagtgactggagagactgtgggtcacccagggccgtgacaccagtgactgcagagactgtgggacacccatggccgtgacaccagtgactggagactgtgggacacccatggccgtgacaccagtgactggagagactgtgggtcacccagggccgtgacaccagtgactggagactgtgggacacccagggccgtgacaccagtgactggagagactgtgggacacccatggccgtgacaccagtgactggagagactgtgggacacccatggccgtgacaccagtgactggagagactgtgggacacccatggccgtgacaccagtgactggagactgtgggacacccagggccgtgacaccagtgactgcagagactgtgggacaacacccagggccgtgacaccagtgactggagggactgtgggacacccagggccgtgacaccagtgactggagagactgtgggacagcacccaggacagggcacatgtaccaaagacccaaaagacagagtgggacatcagaaaaatttgagaaatactccttcagaaatggaactctaagaaagcaaaagaaaacagaaatatctgcagaaataacagtcaagacttcaaaatctgttaaaatgcacccaccctcaggtcgaagtagctcagtttagaaagctagacccaggtgcatcacaaacggccaaagtccaaaaataaaagaaaatcatgtatatagtcagaagtaagagatttcacagtaaggaaaacagaatgagaaaattcctcatcagaacagtagaaaacagcatgaatagaaccaccttaacatgcgcagagaaaaacacagtccacttagaaccgtatatcctgtaaaaatgcacttcaaaagaggaggaggaattagggccttttgatccacgtaagagctaagcctaggcagaatgtcactgcagaggaactacaaggcaatatatattaaatacggcacttcagactcaaagaaaattatccctcttggcaacacggagtctgaatgaagaacttaagagcgccagaaaggtacgaaaatgtacacatcttcaaaggctatggaaaacaagatcccactacacacctattcgaatggccaaacacaaaatactgacaccaccaaacactggggaggacatgggcctcaggagcgcttactcattgctggtgggagtgaaatggcagcttctcattaaacacggtctcatcacacggtccggcaatcaggtttctttattcatccaaatgggctgaaaagttgtgtcaaaacaaaaacctgcacatgggcgtttacagcagctttatgagtaactgctgaagcttggaagctgctaagatgtctttatgtgtaactgccaaagcttggaagctgctaagatgtctttacgcgtaactgccgaagcttggaagctaagatgtccttcaataggtacgtagataaacaagctgcagcacacgcccaggatggagtatcatccagcgcgaaaaagaaatgagccatcaagccacgaaaagacatggcgaagccttcagtgaatatgaaagaagccaatctcaaaggctacatactgtacgtgtacaccaaagcacatcctcatcagacacctcaatacaccaaagcacatcctcgtcaatacaccaaagcacatcctcatcagactcaatacaccaaagcacatcctcatcagactcaatacaccaaagcacatcctcatcagactcctcaatacaccaaagcacatcctcatcagactcctcaatacaccaaagcacatcctcatcagacacctcaatacaccaaagtacatcctcatcagacacctcagtacaccaaagcacatcctcatcagacacctcaatacaccacagcacatcctcatcagactcaatacaccaaagcacaccctcatcagacacctcaatacaccaaagcacattctcatcagacacctcaatacaccaaagcacatcctcatcagactcaatacaccaaagcacatcctcatcagactcctcaatacaccaaagcacatcctcatcagactcaatacaccaaagcacatcctcatcagactcctcaatacaccaaagcacatcctcatcagactcctcaatacaccaaagcacatcctcatcagactcctcaatacaccaaagcacattctcatcagacacctcaatacaccaaagcacatcctcatcagactcaatacaccaaagcacatcctcatcagactcctcaatacaccaaagcacatcctcatcagacacctcaatacaccaaagtacatcctcatcagacacctcaatacaccacagcacatcctcttcagactcaatacaccaaagcacatcctcatcagactcaatacaccaaagcacatcctcatcagacacctcaatacaccaaagcacatcctcatcagactcaatacaccaaagcacatcctcatcagactcctcaatacaccaaagcacaccctcatcagacacctcaatacaccaaagcacattctcatcagacacctcaatacaccaaagcacatcctcatcagactcaatacaccaaagcacattctcatcagactcaatacaccaaagcacattctcatcagactcaatacaccaaagcacatcctcatcagacacctcaatacaccaaagcacatcctcatcaatacaccaaagcacatcctcatcagactcctcaatacaccaaagcacattctcatcagacacctcaatacaccaaagcacatcctcatcagactcaatacaccaaagcacattctcatcagactcaatacaccaaagcacattctcatcagacacctcaatacaccaaagcacatcctcatcagactcaatacaccaaagcacatcctcatcagactcctcaatacaccaaagcacatcctcatcagactcaatacaccaaagcacattctcatcagacacctcaatacaccaaagcacatcctcatcagactcaatacaccaaagcacattctcatcagactcaatacaccaaagcacattctcatcagacacctcaatacaccaaagcacatcctcatcggactcaatacaccaaagcacatcctcatcagactcctcaatacaccaaagcacatcctcatcagacacctcaatacaccaaagcacaccctcatcagacacctcaatacaccaaagcacattctcatcagtcacctcaatacaccaaagcacatcctcatcagactcaatacaccaaagcacattctcatcagacacctcaatacaccaaagcacatcctcatcagactcaatacaccaaagcacatcctcatcagactcaatacaccaaagcacatcctcatcagacacctcaatacaccaaagcacattctcatcagactcctcaatacaccaaagcacaccctcatcagacacctcaatacaccaaagcacatcctcatcagactgctcaaaaccagtggtactgaaaaatcttcaaagcagttggaggaaaaaaaccaagagaggactgaagatttcctgctggaggcagggcaagctggaagacagaagaccttgcacatctgaagaaaacgtcagcaggctgcggcgctccaatgaaaactcctctatgcccatccccaaacacccaggttgccgagtggctggccctggttctcacagctcctggcacaggctcaccagcaagacccctgactctcccacacccatcatgcaagtggtcctggtccttcaccaatagtccctgaggccaagccacagtcacctcccagctgggggccggccctccccatatcccatcaccatgcatgcccacatttccctcactgatgtggacaatatgcaacccaaccagcctgcac[141 bp omitted]ccatctctacaaaaaatataaaaagtagctgggcatggtggcgggcgcccgtaatcccaggtggcgggcgcctgtaatcccagctactcgggaggctgaggcaggagaatcgcgtgaactcaggaggcggaggttgcagtgagccgagatcgcaccactgcactccagcctggcgacagtgtgagaccctgtctaaaaaaaaaaagcaaaacaaaacaaaaaaacaatgcagacctaaagtggcttccacaccaagaacaaaacttggcctcatgacctactgtccccaccccgcccaacctctgccctctgtgccctcagcttctcctggagacccaggcctctgtcctctgcatctgctgtcacgcctgccaggcctctcggcaaactttcagcaaaggaggcccattctccttcatgtttcagcttaaatatcacttctaggaggctgccccgaccacctctacccagacgtgggccctcctcacatcccgtcatcgtggccacaattcccttactgacgtgaacaatacgtagcccaccacgtcatgcccccggtgcaccccctcgcccgtgttgctcacgacttatcctggaccctccaagagacatgcaggcccccaagtgagatgacgaggacacctgccgccccagcccccacccgatccaccacaaggcaccccgggcttcaaatcaagtttaataaataaaacagcaaaggggggttcaaggcagttatcacttcacagtgtggtccttggtggggtgagggatggtcgagtccaactcggaaaggggctcgagcacaagaggccggacgacacccggggcagggcgcgccgccgcccacggaggaccccactccaacgtgtaaacagaaacagaaacgaacgagagggccagggaggagggggaccaggactccaagccatcttgctaggaagcttcccacagaaggaagacctgcagggctggggaaacaggctggagtctggcccctgcgtggccagcagggccggctcctccggaggctccctgccttggtaccgggggaggacagcaaaggggatgtaaatcacctgtctcctcaaacccacgcctggggttgctgagggaccccaccccaaccgctcaggatcggggagcagggatggagggggaagaggcaggtgggggtgtaaagtgcggcttttcctgaagtggagacgatggggtgggaaggcgaggctggggtgggggccggacagcgaggtatatggctctgtgccccacggggttggcactgagtagcagctgcccacgacccccagggctggggcagcccgcggccctgccgggtgtggagagacagagccaagcagggagctgagggcgccccggcggaggctgctggtgcggggcagggcgtcctgcccgtctccccgccggggcagtgacgccttccctcgcctctgctggctggaagggactaggtggccggctctgccctgcgtcccaacggcggggtctcttctgtccccggctgcccgacggatcccacgtgcaggcagcggcccggacccgggtggcagtgccgggcgctgacggcgctgggtggggccgtgggtccattctgtgtggacaggggcaagggctcacggcccagccacctcaccccagtcctgacgtgttctgaagcagaaggaggtgctaccccaaggcccggggggtggggaaggggtcaggaagactgacagaggcgggcccagcggcagcgctaagtccagtctgggccgcatacgccgcccgcggccaggagtcagcaggtcatcacgttacagctgcaggggagagaccaagagagacgcagagagtgtcagtgcggccccacgtgcctgcacagcccagtgctgagcgctggactcgagactcccagccttgcctcccccacagcctatggcagccgggcccggggtgccctgaggggagctggtggctggagcaggggtgggacagcctggcacctgctcccatttgtggagaatgtggaccacatgaatgtattctccagtcaaaaaatacatacaagtaaagaataaacctaaagacacactgagagcctgctcgtggagccacactgtcctcgggtccttggggcaaatgcctcccaccctcctctgctcagcctgagggctggggggacctggttggagtgttgcggaggctccgggcatggggtggcactcactgtgacaggggctccgagtgtagcccgggggccgggcacgtggggtgggcggccaggaaggggttcacgtccccaatgccgatgagtccaaactcggtgaccgacaaagccacctgtgctggggccacagtctcctccggatccccgctgaggtccacatggctggagatgaggggcagctccttgggcagggcgaagtccacggccagccttgggctggcgtctggctccggagcagtgacagctggctggtatgaggctgggtcggccagggctgggggccgatgggacaggggtacagcgggggactcatccagctgctggaaggaacacggccctggctccgaggacgggagtccatcagaggccactccgggctcatcgagaccaccggccgtgccatccacgctcagtggatctgtgaaagagaacgcaacagagggtggggcctgcccacagccgcggatcctgtgcaggctcctgcctaactttgctgggtccagcaaagcctgtggatccctccccagaaaagcctccacacaaatacaaaagacaccagttacactgaaatccgcgagccccaggttaagggtctcagctttagaagtagattttagttcatcagaccaacagtgggtcacaacccacatctttaaaaagagcagaatacaatagacataggtgtaaacaatgccgggggcactgcagagggtaaatacagggtctgtggaatacacagacttaggtgtaaacaatgccgggggcgctgcgagggctaatacagggtctttggaagttttgttcccacaggcagcgcaaggggcctcaccacaattctaggaagtagccgaggtggacaccctttggcaaacaaaccatggaaacaaccagactctggaaatgggggaccctcccagactcaaccatctaaacacagagccagaaagcaaaggatcctcgtttgcaccctccccgtgtgggtctccaccttcggacgccacatcagacaccaccatcggacatggtccctacccgaggccctgctgtgctccgtcatggcctcaggtgcaagatcctggcgacggctccggacaccctgtccttcctgagtgtcctggtgacgggctaagtccccaccctggggcaggaaggccctccccggagactgaggcctggtaaataccccaacctcaccatacggggctccccagcagtggggccacatgcacccctccagcaagcccagagggtaagcgtaatccctgccctcccctctcccagccaggtgtacagagcggcatccacatcacgtggctgccctccgccacccagacgcccactcctcctggcgaggctggcccagcacagggcgccaggcaggagaggctccaccgggcctcactcacggctccagacccgtggccgcccccagggcaggagatactccccaagcctcacctgtgcgcatcccagtcagggtgtcttgctccgggcgcggacggccggggccatcggggtcgctgccatccaggtcctggtctgcgtccctgtggggagagggcgccatgaggggcggcagacaggacagacgcccccacccaagaggtgccgcccaggcgcccacgtgcccacccccggcggggtggccgcctgtcgttactgctggggagggctgcacgcacgtggttccggacgggacgtacttcctccggcccagccgcgtctgctgggcgaagtagtcgtagcgctccgacttcttccacaggtagtagtactcgacacactcgcccactgaccgtgtgcgcacctgcggggaggggtcaggagccatctctgtccccggctgcccagccccagcacctgcaccacgatcccaggacgtcctgggaccccgggacagcacagaaggagcacagcacccaccactctcagataacgcaagaccccccgacccatgaccctaacaggccacaggctatgcccaccacagggaacaggggctcggagcactgtggcactgcctcctgtttcaagccccctcagagccctccagctcctggcttgagacccctttcccttctgtagcatcagccagacaaacgtaccctccaggcctctgtctactgctcacccaccccatcccagaccatgagccacgggccagttgcgtccacctcatctgcctgcttctcacaggcccggggtgggagtgggagtgacaacccccgggtccacagactcctggactgagccccttccccgggaggaagaggcacaagcccgcggcgcctgctttcccaccgaacacatccctccagggcccagcgaatgcttcccaagtgcacagaagacaccgcagaaggacacatgggttctgtgaacccgacaaaattcccaacgtagcacataaagggccaaacacacatgcacacaggcttcagggagacgagaagggacacacacacacacacacacaaggcttcagggagacgagaagggacacacacacgcacacaaggcttcagggagacgagaagggacacacacacacacacacacacaaggcttcagggagacgagaagggacacacacacgcacacaaggcttcagggacacgagaagggacacacacacacgcacacaaggcttcagggagacgagaagggacacacacacacacacacaaggcttcagggagacgagaagggacacacacacacacgcacacaaggcttcagggagacgagaagggacacacacgcacacaaggcttcagggacacgagaagggacacacacacacacgcacacaaggcttcagggagacgagaagagacacacacacgcacacaaggcttcagggagacgagaagggacacacacacacacgcacacaaggcttcagggagacgagaagggacacacacacacacgcacacaaggcttcagggacacgagaagggacacacagcaagtgtgttccatgtggcacctggcacagagctgggcgcacacctggcaacacctccaacatctccacccgggaggctcatcccacagagagcttgaggctgtggccactgctggtgatggcggaaaagaccccctcacctggacatgctctgggccaactaacccaccgccacccagaacgaggatgccccatgctcaccgctgcgagaacaacgtggggtcctgcctgggggcgagaccgagacaacctccctgcagggcaaacctcaaacgcacgccacgagggagctcttctgtgaagggccagggtgaaatacgcactggctcaggctgaccaacgtgtgctggctacacacggcccctcgcggctgggccaggacctgcccggagctccagaaacacggccgggagttacaaaaacgcggccctgagctatagaaacacggcccggagctgcagaaacacggcccggagctatagaaacacggccgggagctgcagaaacacagccgggagctatagaaacacagcccggagctatagaaacagcccagagtccagaaacacagcccgaagctccagaaacacagcccagagctatagaaacacggcccggagctataggaacatggcccggagctgtagaaacacagcccggagctacagaaacacggagtccatagaaacacggcccagagtccagaaacacagcctggagctgtagaaacacggccaggagtccagaaacacggcccacaactccagaaacacggcccggagctacagaaacttgacaggggctccaagtgtagcctgggagcaccacactccagccacacctcgccccgctgtctccaatcaaaacaccacgtggtgctggagtctgacaaggacagtccatcgctgctgcgcacggcaccgcacagtcacctgagcaatgtcctgagccgtacaaccagccccgggcaggtgcctcctcacccaagcccttcagtggacgacatcgggccccaaatggagcacggtcccaggacacgaggcagaagcaaggctcggcaacaaggccacagcccactggtcctgaagggactcagtgcccaaccggggcgtggacagaggcggagaagccactggtcagagccatgggaaggttttcagccagagatgtctgactgccaagaggctggcttggaagttaccactcaagaagccacagggcagagggcactgctgcagacatgcagagacccacagaggacgtggggaaggtctaaggaagggcagaaggccccggcacttggcagcacctgcctgtcatgagggtttgtcccgggtggcaggacctgggtccctggaggagggaaccaggagacccctggtctccaggtgtcaggggttctgctgtggggccaatgctggacactgagccagcaggctctgctcagaggacacagacttgaagatgaggtgcccagggccctggggtggaatgtgaggcagaaacaactactagaattcagcttttgccacattctttcccaaagccagagccttgttcttgtggggacaggaaaggggcccacagcagtcagtagcaaaaaatgcagaagacagcaatgggcacacggtgaggaggcggacacaggacacggggctccaggcctccagtcggccgtgtgctgtgtgcctgcggaccctgagcccctccccagatcgagaagcccccggtggagcctggcagtggagtccgcaccttgttggcctggatcaggtgaaagttctttccatgcacacggaagccgtgctcaaagttcctgcactcctcttcactccaagcacagagcccatctgcaaacacggccggggagaacggtcagtggtgcccagggcggggccgcagcggaaggaaggcccaggccggggagaacagtcagcggcgcccagggcggggccgcagcggaaggaaggcccaggccggggagaacggtcagcggcgcccagggcggggccgcagcggaaggaaggcccaggccggggagaacggtcagcagtgcccagggcggggccgcagcggaaggaaggcccagaccgctgctcacctcggatcaccttcacgttgaaccgcagccttcgcagggcctcctccacattgaagttgcatttcaccaactcgtacagcgcctggggagaggacatgttggctcttccatgggctcagcgcaggagccgacagcaagaactgtctataccatccagcgagtggcatcaggggccgtccacaccaccctcctgggcgatgtcagagccacctacacctctatccagggagtgacatcaggggccgtccacaccaccctcctgggcgatgtcagggccacctacacctctatccagggagtgacatcaggggccgtccacaccaccctcctgggcgatgtcagggccacctacacctctatccagggagtgacatcaggggccgtccacaccaccctcctgggcgatgtcagagccacctacacctctatccagggactggcatcaggggccgtccacaccaccctcctgggcgatgtcagggccacctacacctctatccagggagtgacatcaggggccgtccacaccaccctcctgggcgatgtcagggccacctacacctctatccagggagtgacatcaggggccgtccacaccaccctcctgggcgatgtcagggccacctacacctctatccagggagtgacatcaggggccgtccacaccaccctcctgggcaatgtcagggccacctacacctctatccagggagtgacatcaggggccgtccacaccaccctcctgggcgatgtcagggccacctacacctctatccagggagtgacatcaggggccgtccacaccaccctcctgggcgatgtcagggccacctacacctctatccagggagtgacatcaggggccgtccacaccaccctcctgggcgatgtcagggccacctacacctctatccagggactggcatcaggggccgtccacaccaccctcctgggcgatgtcagagccacctacacctctatccagggactggcatcaggggccgtccacaccatcctcctgggcgatgtcagggccacctacacctctatccagggagtgacatcaggggtgtctacatccccttgcaggatacccggaggcgtctacacctcctccctgatacgtggttttaattggccccccttctgacctgagtagctgttccagtgccctggcccccacacacctgacccctgccctcccctctgccctccctggcccctggaggcactggggtgtgagctctggcccacgccacggcagccctcagcccctctgtccccggcatggcagcccccacctgctcactgtctttcacggcttctccctctgggagctgaggcccggccatctcgtgccaacgccgcttcaccgccctgtacaggaactcctccacctccctctcagggaggacgctggggtcccagagcagctggtcttcgttctcgtagactgcacaagcagagggcaaaggtcagcttgcaggaacccaatctgcacccacacacgccaggacaagcaaagcagccaactcagcccctgacagggaggaggcactgtccgtcctccctttcccaagccctgggccgccatccctgtgctcctcctgggcttggtgctgctgtgctcaattcaactaccgagtgggtccagagcaggctctgggcaccacacacaggcctgtatcccaacgaccaagtgcagggagccatgagcagtcagcaggggcgcctgatccagccaaggggtcagaggaagctgtggacagcctagatctggggcaggggaattctaagcaaggactctgcagagggggttctaagtagtgagaccagtgaggtgaggctggcttcaggctgcacagctacaagggcacctgaaatgcagaggcctgagggagcagcaaggacgcccccgactctgcataaaggcagctgagacttgggcccgtggacaagcgggagcccccacagttaggcactgtcgcgctctaaccctgggagctgaagagccacggccagaaggtgcatcacctctggggagacatcctgcccccggtagctggtgtggatggcagatgtgctcacagaggggaggaaaagtccacgacctcagatgcaattggctttcggcaaagggagggacgcagcctccagctgtggtgagggacgtgactggggacaaggcaggggagagctcagggccaggtctggcaaggctcaagtgccagcacctctcaattatccaggaaagaggcacaggatcccaaacaaagcaaaccaacaaataaaaaacaaaatcagtgcacgggaagaaatgtgaaaaacgcactggggaaaacagctccacacgggagtctccactgccgggggctgacgcggtaactagctcccaggttggtgctgtgccccaccaagcaggggcctctcccggtcctcatggccatgaggaaaacaggcagacaccacagccacctttctccatctccacaggcgacacctgagccctgcttggacagaggtggtctccaagaaaacagcagaccatctctggagaaaaagaacaccacatacagcctagcatgtgaagggtgggaaaacacgagggaaaaacattaaccggatgtgagggctcatgtctgtaatcccagcactctgggaggctgaggtgggaggatcggttgaggccagagtttgagactcgcacactccatctctacaaaaaatttcaaatgtagtacaggcacgtctgtagtcccagctacggtgggattgaggctaaggtgggactgagcccaggaggtcgaggttgcaatgagccatgattgcaccactgcactccagcctgggaaacagagcaagaccctgtctcagaataaaacaagaaaacaaggccaggcgtggtggctcacgcctgtcatcccagcactttgggaggctgaggcgggcgggtcacctgaggtcaggagttcgagaccagcctggcaaacatggcgaaaccccagctctactaaaaatacaaaaattagccgggcgtggtcatgggcgcctgtaatctccgctactcgggaggc[131 bp omitted]acaacaaagcaggtctacacacagccgatgttaagagtcagcacacgaagacttcaatctaacgaggattaatacgttaaggaaatggacaaaacgccggagagtctcagcagagacttgaaatttatagaaaagaatctcaaggaccttccaggactggataatacaatacccgaatggacccactgaacagcttttttaccagcagcctgaacacagcacaaaacacaattagtggaatcaaaaggaaaccaatgtttacaagaccaaaaccaaagtgtaaaaggaaagaacaccgtttagggtagtacaagacagtgaggcaacctctaagatacgtgtaaatgagtgacagagaaagcaaagaaggaggcagcacaaaatctgaagaggtaacagccaagaattcttcaaaactgacgactgataccaacccacagagccaggaaactcaggacgaatacaaggacacacgaagacgtgtgcacaggcacaggagagccaaactggtgaaaaacaaacaaataaaggaaaggaaacaactcttaggagagaaaagggcacaatgacttcagaagaaagagtaagaccgtcctctgacttctcaacagaaacgatgacagccaaaacgcaatggagtgaaatttttcaagtgttgaaagaaaacaccctgcaaacctggaaaaacatgccatgaaaatatgctttaaagaatgaaagcaaaaatccaggcttttcagacaaaaaaatgctgaaagaaagcacaaggcctattacaaaggaagttcttccggctgaaggaaatgattccaaatggaagctggaggaaatatgtggataggataaatacaaagaatgttcactgtttaaaacaacaatgttatcatcttgtgatatgtagattttttttttttggagatggagtcttgctctgtcccccaggctggagtgcagtggtgcgatcttggctcactgcaacctccatctccggggttcaagcgattctcctgcctcagcctcccgagtagctgggactacaggtgcccaccacgcctggctaatttttgtatttttagtagacacagggtttcaccatgttggccaggctggtctcaaattcctgacctcaggcaatctgcctgcctcggcctcccaaagtgctcggattataggcatgagccaccacagccggctcatatgtaaaattaacgatagcacaaaaggcagggggcaggtaaattgagttaaactgtttcttgcattgtaggggaactagaatgtacttatttcaagctgtgaggcccggtgtggtggctcactcctgtaatgtcagcactttgggaggctgaggtcactggaggtcaggagttcaagaccagcatagccaacacagtgacacctcatccctactaaaaatacaaaaattagctggggatggtggcgtgtgcctgtagtcccacctacttgggaggctgaggcaggagaatcgcttgagcccaggaggcggaggttgcaatgagccgagatcacaccactgtactccagcctgggcgacagaacaagactctatctcaaaaaaaatgtagactgtgataagtcaataattcatgttgtaacctctaaagcgctaaaactaaaacttataagctgaaacagaaggacaaaataaacctattaa[181 bp omitted]cggtggcgggcacctgtaatcccagcactttgggaggctgaggcgggcggatcacgaggtcaggagatcgagaccacccgggctaacacggtgaaacctcgtctctactaaaaatacaaaacattagccgggagtcatggcgggtgcctgtagtcccagctactcaggaggctgaagcaggagaatggcgtgaacccgggaggcggagcttgcagtgagctgagatcgcgccactgcactccaacctgggtgacaaagcgagactctgtctcagaaaaaataaataaataaataaataaataaataaataaaataaaaatacaaaattagccaggcatggtggcggatgcgtgtaatcccagctacttgggaggctaaggtaggagaatcacttgaacccgggaggtggaggttgccgtgaagtaagatcgcatcactgcactccagcctgggcaatgagagtgagactctgtctcaaaaaaaaaaaaaaaaacaaacaaacaaaaaacaaagaacagatggaacacacagaaagcaaagagcaagatggtggcattacacaattgttttataattacatgacatacaagtgatttaaaaaatgtacatggactaaaaagtctattaaaagacaatggttttctcagacaattaaaaataagatctaggtcggacacagtggctcacacctataatcccagcacattgggaggccgaagtgggcaggtcacttgaggtctagagattgagaccagcctggccaacatggtgaaaccccatctctactaaaaatacaaaacttagctgggcatggtggcggacgcctgtaattgcagctacttgggaggcagagggggaagaattgcttgaacccgggaggcggaggctgcagtgagtggatattatgccaatgcactccagagactccgtctcaaaaaacaagatctaaacatgtgccatttacagaaaatacacttcaaatataggaatctagaatggaaaaaagaatgggaaaaaaccatgcaaacactaaacaaatcaacaaaaagctgctgtggtcacactgatggcagattaagtacttatttacggtaagaagtgttactacagagagacacgtcacaatggtaaaagaaacaattcaacacaaagacaaagcaatcttaacgtgtatgcacttaacacaatgtgaagtaaaaatggacagcattaaaaaggggaaatagacaatccacaatcagaggaggtcattaacaatctttcagtaaatagaacaagcagccaaaaaaattaagtgagaatacagatgatgtgaacaacaattatccagcggatccaagggaatacacggaaaattccacccaacaacagcacagcacactctcttcaaacacgtacaacatttaccaaaacagatcaaataatggacataaagcgaggtgcaactaattacaaagaactgaaatcacggagtatgttttctgaccacagtgtaattcaattaaaaatcagtaaaaggaggctgggcgcggtggctcacacctgtaatcccaacactttgggaggccgaggcgggcagatcatgaggtcaggagatccagaccatcctggctaacacagtgaaaccccgtctctactaaaaaatacaaaaaactagccgggcgtggtggtgggcgcctatagtcccagctacttgggaggctgagacaggagaatggcgtgaacccaggaggcggagcttgcagtgaacagagttcacgccactgcactccagcctgggccacaggtgagactctgtctcaaaaaaaaaaaaaaaatcagtaaaaaggctgggtgctggttcatgcctgtaatcccagctctttgggaggccaaggtgggtggatcacctgaggtcaggagtttgagaccagcctggccaacatggtgaaaccccatctctactaacaatacaaaaattagctaggcgtggtggcgggcgcctgtagtcccagctactcaggaggctgcggcaggagaatcgtttgaaccttggaggcgaagtttccagtgagtcaatattgcaccactgaactccagcctgggcaatagagcgagaccctgtcacacacacacacaaaaagtaaaaaacagaaatccagcaacagggagacatgaacaaggctaaagttagtcctttgtaaagagtaatacaattgataaaactttttgtttttgtttttgagacggagtctcgctctgtcacccaggctggagtgcaatggcgaaatcttggctcactgcaaccgctgcctcccgggttcaagtgattctcctgcctcagcctctccagtagctgggactacagttgcgtgccaccacgctcagctaatttttgtatttttagtagcgacagggtttcaccatgttggtcaggctgttctcaaactcctggcctcgtgatccgcccaccccagcctcccaaagtgctgggattaaaggcatgagcccccactcctggcctctcacatcttaaagaataattcctccagaggttaggaaaaaggcacacttccaaacacattcacgaaagcagcataactctggtaccaaaaccagacacggacaaataaaaataaaaggacaggccagtacctccatgaacatacatgcaaaaatcataaatgtgagcacatcaaactgaggagggaagggattaaatacgtatatgttgattttcattaatccaggtgctcacagcgagcatgtaatcactgcaccaggggatacacagcattttcatcaagcaatcaatacataaacttgtttcaggtgtccacttaaagacgccttactgcaggccgggtgcagtggctcatgagtgtaatcccggcactctggggggctgaggcggacagatcacttgaggccaggagtttgagaccagcctgggcaacaagatgaagcctggtctctacaaaataaacaaaaaaaaaattagccggcgtgcagtggcgcacatctgtagtcccagctactcgggagactgcagcacgagaatcacttgagcccgggagcagaggttgcagtgagccaagattgcgccacggcactccagcctgagcgacagagcaagactttgtccaaaaaactaaatagatagatagataaataaataaaatttaaatttaaaaaatagatacgtaaataaaatttaaattaaaaataaataaataaaatttaaattttaaaaaatgtgtcattgcaggggttcccaacccccaggccacagctggccgcacagcaggaggtgagcggcaggagagccagcatcactgcctgactccgcctcctgtcagatcagtggtggcattagattctcataggagcgcaaatcccactgtgaactgcacacaccagggaggcaggcagcacactccttatgagaatctaatgcctgatgatctgaggtggaacggtttcctcctgaaaccacgccccctactccaacatccgtggaaaaattgtcttccacgaaaccagtccctggtgccaaaaaaggttgggagccactgtctcactggatctgccttgtggattcactaacactgaactcacggccagcagccccagagcttgcgcctgagtggagcttctcgaattttctctgaaagggacatcatagccttcttccacctaagaacaccagacagaacgtcggcactacatttaggggccactttaatccgtcaagtagccgacacaaggcacaaggatgtgaaaaacggcattcagtacacggcaggaaaggcacgtgctcacagtaaaagatctgagagccaagacagagcagcagcttgtcccacctcagctggaactgtacgtcaggtaactcgccttcactgacactctacacacatctgctggcgcctgaccgtaaaggtgttgcgagttttgatttgcggtttcaaataaattttaccaagtaggcaattcaccagcacagaacccacaaataatgaggactgagtgcatgagatacatacacacaagagagaacacttcatggccaggaagcacgtttattccaccgtgcaccgttaacttaacgtttgaaaatcaatttatgggccgggcgcaggggctcacacctgtaatcccggcactttgggaggccaaggcaggcggatcacctgaggttgggagttcgagatcagcttggccaacatggtgaaaccccatctccgctaaaaatacaaaaatgagccaggcgtggtggcgggtgcctgtactcccagttacttgggaggctgagtgggagaactgcttgaatccaggaggcggaggttgtggtgagctgagattatgccactgcactccagcctgggcaacagagcaagactccatctcaaaaaaaaaagattaaaacttgtcagttgctgaaaaaaataagttttaatcttaaaacttacatagatatgcaatgaaaacttacaaagttagaagacttgcaccacctcagacttccttgtaacctgtaataactgagacagtggcgatgactccgggtgagacaagacacaccttacaggcacctgatttaccacaaaggcgtcactgcagctcagtgggggagacaatggacttttgttgtttttatttttatttttatttttattttttatttttgagacagagtctcgctctgtcacccaggctggagtgcagtggcgcgatctcggctcactgcaagctccgcctcccgggttcacgccattctcctgcctc[212 bp omitted]atcacagccttaaatgtgaaaggaaaaacaataaatcttctagaaagaaacgtggaagaatatctccaagagcctgaggtaagcaaacactccttaagtagaacacacacacacattattattcaaataatgattgataagttggactttattaaaattaaagacatcactaagagagtcaatgggcaaaccacaaactggagaaaacagcagcagtgcacaaagcccagaaagacttgtttccacaaaatgtgaatgactacaaatcagaaagggaaagacaacaaaatgggagaaagcttggagcacgcaaagagagaatatccaaatggccagtacacctgcgaaaggtgctcaccagggaaatgccaattaaaaccacaatgggacaggagtccatatccaccagacgggctaaaattcaggcaaattcaccctcagtggcaaacaccgagaatgtggagcaactcccacaaatcattagtgagaaactcaagcagtatgcgtcaccctaagcacacacctcccacacgactccccgctgtccatcaagtgccgagtgcctatgtccactaacgacgcacacgagggcattcacagcccacagctgaaccaaccatgaccgcagcccatggcagaaagggtgggtaaatgtggcatccaaaccaaggaccacgatgcaacacacaagacacacacaaccacggcatccaaaccaaggaccacaatggaacacacaagagactcaaaaaccatggcatccaaaccaaggaccacaacgcaatacacaagacacacacaaccacacagacaactcaaatgacagacgtcatcacaatgcaatacacacgacacacacaaccacgcagacgactcgaatgacacaggcgtcatcacaatgcaatacacaggacacaaccacacagatgactcaaatgacacagacgtcatcacaatgcaatatacaagacacacacaaccacgcagacaactcgaatgatacagtcgtcatcataatgcaatacacaagacacacacaaccacggcatccaaaccaaggaccacaacgcaatacacaagacacatacaaccacgcagacgactcgaatgacacagacatcatcacaatgcagtaaagacacacacaaccacacagatgactcaaagaacagacatcatcacaatgcaatacacaggacacacacacacaaccatgcagacgactcgaatgacacaggcatcatcacaatgcaatacacaggatacaaccacacagacgactcaaatgacacagacgtcatcacaatgcaatacacacacaaccatgcagatgactcaaatgacagacatcatcaccatgcaatacacaagacacacacaaccatggcatccaaaccaaggaccacaatggaacacacaagactcaaaaaccacagcatccaaaccaaggaccacaatgcaatacacaagacacacgcaaccacacagacaactcaaacgacacagacgtcatcacaatgcaatacacaggacacacacaaccacagacaactcgaatgacacagacgtcatcacaatgcaatacacaagacacacaaaaccacacagacaactcgaatgacacaggcgtcatcacaatgcaatacacaagacacacacaaccacacagacgactcgaaggacataggcgtcatcacaatgcaataaagacacacacaaccacacagacgactcgaatgacacagacgtcatcaccatgcaacacacaggacacacacaaccacgcagacgactcgaaggacacaggcgtcatcacaatgcaatacacaagacacacacaaccacgcagacgactcaaaggacataggcgtcatcacaatgcaataaagacacaaccacacagacgactcgaatgacacaggcgtcatcacaatgcaatacacaggacacacacaaccacgcagacgactcgaatgacacagacgtcatcacaatgcaatacacaagacacacacaaccacgcagacaactcgaatgacacaggtgtcatcacaatgcaatacacaagacacacacaaccacgcagacaactcgaatgacacagacgtcatcacaatgcaatacacaggacacacacaaccacacagacgactcgaatgacacaggcgtcatcacaatgcaataaagacacacacaaccacgcagacgactcgaatgacacagacgtcatcacaatgcaatacacaagacacacacaaccacgcagatgactcgaaggacacagacgtcatcacaatgcaataaagacacacacaaccacacagacgactcgaatgacacagacgtcatcacaatgcaatacacaagacacacacaaccacgcagacgactcgaatgacacagacgtcatcacaatgcaatacacaggacacacacaaccacgcagacgactcgaatgacacaggtgtcataccgagtgggaggggccagctggcatcccatgggacgaagaagtcctggctgctccagacagggcaccctcatggggggtgagtcagggtggggaaagggccctgatgacagactccaaagccagggtttctgggtgagggtcccaagtgtcccctccgaccctgccttctggatgtcccagcagcttggctgcaccttcctggctccgtcctcttctcacacggggcacccccgaccagccccaggaggacgacttctcttcacggagggtccctgtctccctggactcagtacttctgctgcacctgtcccttcccaccacgcatctcagccactgaatcaccttggagaaggctcctgagctaggagcactggcccagggcctgcaagggctccagggcaacacaaatgagacccaagtcaatgggcacgtgactccacgcctcaaaggggcaagagagggtcgattttgaactctagtgggaaagagacgaaggtcaagcccaggaaagggagcaccctgaagaggagcggagcaaggccgggggtgcagcgcagcatccggcgggtctctggagaaccatctaacccggcacagagccatcgaatgcagcggcccaggctgtggggaggcggctggagtcaagggcagggcagggctgggtcagaggcaggacgggctgctgagggtctggctgcacaggctgaccagagcagaccccaagggagggacagagctgggcaggggcaggcagcaataggcccactgcagccacgagagcctcccacctcctccagccacaggctcagctgccccagtgagcgatgcggggcggggacctgaccagactgtccaaggatctgacgtccagccaggccactccccttgcagaagtgggtttcgcctcctctccccaggccctacttactcttctcacagtgccggttcaagtgcaggttgctgaggtcagcttggaactgaggtcccaccatgatctcctgcaaagcaagcacctgggaatcaggacactgaggagcatctaggccgggcgggaggctggctgcagcgtgctgtggcaggcttacggggaggggccactgtccagaccccagacccatctgtgccgtctacctgctgatgcccagttctggggtctgaaggtgggaggcagaggcctgggtgtgtgaggggtgaggctgtgtcctgacgcctggcctggcagaggcccagacaggatgtcggaggacaaacactctgggtcagcagcaggggcccaggctccggtccaaagcacctgtggccggtcccagcccaccctggggtcgagcagcacgtccctcctctgagaaggggcacaaacccagggagagggctcagcaggacccggctgcggttactgaggccgagataccaggttggggagagggcagagccatgggagggatgccaggttggggacacggcagaaccacggctgggatgccaggttggagacacagcagagccacggtcgggatgccaggttggggacacagcagagccacggttgggatgccagtttggggagacggcagaaccacagtccggatgccaggttggggacacggcagagccacggccgggatgccaggttggggacacggcagagccacggccgggatgccaggttggggacacggcagagccacggccgggatgccaggctggggagacggcagagccacggtcgggatgccaggttggggagacggcagaaccacggccgggatgccaggttggggagatggcagaaccacgtaccttcttacatttgttggcaggaagagagtcctcctcggtgtcggaggaggcagaagagccaggctctctgtcttcatcagccaggaaacgagctttgggaaaacagaggcaggtcccccagggtctccactgcctgcagcctatacaaccccttctctccactcccattctccatccacctgatccccaggccataaccctctctctggccagacattgggtaaacagatgggcacaggacccaggaccagggatgcacctttgaagaaagaggccttcccttctatgcagctgctgcacctctgggccccgagccctcagttcccaggaaagccagcacagaggcttgtgaaggaggccggttctgggaatgctgtccctggatctgctaggggaaccaacatgttccctacttgtttaaaccaaatcgctctgagagtccaggctcactggccagcgtggaggagaacaaagcacccccagggctactgacgcttcccgccaggcagacgccctcatctgtgatgagttcttggcctgcatcagcccaaggacccttcatcaagcatcacgactgcctggcagggggcctggctgcggtggagtatggggacagagtcacctacatccactccggttagggaagaggtcggaggcctcgtgggaggtcacggacggggtgaggtcgtcagcagatgattgcgtctcttcctcttcttcccctgaaagcaaatccttcgctatttgttcctttaaaaaaaaaaaaaaaagtaaagaacattttacagtttaacaatctcgcaataccactaatgataacaacagtaaagacactgggagtgccctgaggctcacatggggctgctattcccattctgcaaagggtgcacagcgtggggggagcggggatgggaaggagacacgtgggagcccacacccagccaccagagctggagacagttagagctgccactgggcacacgcccggagtgcatggctctttctctgactgtgcatttggttttaaccttctacaatgcagcccgcccctgctcccaacacccaagccttgacctgtgacctctgggtacggaatggcagagagaccagtcctggggaggccccgatgtgcccctccacccaccaaagccagaatgacatgtggcctggggttaaggctagggtccagccccatgcccatggccattccaaccccagggtagtggtcacaggtacattctacttattctgggggcctttgtgcctcctctcactgaacactcccctctgcagagaggcagcgccaggcccccccaccttcagctgtgagccagttccaggaagggccctcacttactttgtccagggtcatgtctgggaggttcggggccacgtcaccaccctcactctcccggtctgaaatggggtctgacgcctcgtagccatagagcgcaagcagctcatcaaagggcatgtcgttgctctgagttggggaagggaacaaggccccatcaggagggacggctctgggggttcctgtccctgtcctcttgcctgagcctcactggccacaaccagggccactctgtcacacccatagcaactccccacatggcagcactccccagccagacctcaggcccagtccttcatccaagagctcctttacaatccctcagaggcaccagagcctaggggtcaccggccagggaagagggcaccaccctgcccacaatgcctccttgcacagggtgaattacaggaatacaaggatggtgtgacacagggtgaattacaggaatacaaggatggtgcgacacctggcaatttactattgtaactcaacatcaatatattaaaggggaaaaaagttatctgaaaaaggcatttggtaaaatccgacatctattcctgatttgaaaaaaaaaaaaaaggaactctcagaaaactacataaacaggccagacacagtagttcacacctgtaatcccagcattttggaaggctacagcaggcagatcacttgaggccaggagttcgagaccagcctgggcaacatggcgaaatcccgtctccactaaaaatacaaaaattagctgtgcttggtggcatccacctgtagtctcagctactcaagaggctgaagcacgagaatcacttgtactcgggagatggaggttgcagtgagccaagatcacaccactgcactccagcctgggtggcagagtgagaatctgtctcaaaataaaaaaaaagaagaaaactatgtaaacggatgcttcatcaatataatggagaagctgtcaattcacactcagtcaaaaatgggtaaccagagcagcccccatcacgatctggaacaagagcactgtgattaacgaacactgttttgatgctctgagccaatgtaatatgacaagaagtataaataaggcacgtaattcctgggaaggaagagatgcgaactatcaacatcatgctctccagtgctgctttcaaatccttctgtcctcccttgtgtgagcctctattccacagaggctagtcctgtctgctcagactccacgctgatccctgtgggtcactttcagcttccaacttccggaacactccctctcattctctcaagatgttagcactggcctcccctccaccccagctcctgcccagactcaacctgggggcttcaagtccacatagaaacctcccagcctagtcccagcccttctccaggtggaatatctacactgagtcccccttttgttctctcacaggaccccgtggaaagaacagattctgtatgtccattaccttcaggattatgaaggtgggaaggttgacacagtggtccagaggcccttgggttgcctgaacctctccatagtagcccaaggtgaagaccctttcctaagagcactcagccgtgacttccatttttggcttcattgaggcttgcactgatagtgcagcattggcagccggcaagagcccagtgcccgtggaagctgcagccagtgcatccctgcccacaagtcactgctgtcacattcctcacagaccaaaagcaaacaccccagcttcacttcagaagatgctggacagccgggcaggatggctcatgcctgtaatcccagcactttgggaggctgaggcaggcggatcacgagatcaggagtttgagaccagcctaactaacatggagaaaccctgtctctactaaaatacaaaaattagctggggatggtggtgggttcctgtaatcccagggagaatcgcttgaacctaggaggcagaggttgcagtgagccgacattgtgctactgcactccagcctaggtgacgagagcaatactccgtctcaaaaaaaaaaaaaaaaaaaaagaagatgctggacaaagtgagcattttgttaagtctcaccctgagcagatgtttccatgtgctgtgagggcgtgggaagcatgcagaatgcacctgctgcataccaaagtgaggtggttccttcaaggaaccacatgcatggaacgagtggtgagacgaagaggctgttcctggtcgtttcacctgaaagaatgctggccaactatagccactcagaaaggcacctggcaggcgctgccttgtatgcaagccaggggggctgttactgcaaaggaaacagctgaccataactgctgcaatggtaaaactcaagattttgaaaaacttgggtttgac[133 bp omitted]gaacatgatgaaaccccgtctctactaaaaaaaatacaaaaaattagccaggcaaggtggcaggtgcctgtagtcccagttactcgggaggc[134 bp omitted]aggctggtggtgatatcaactgttacagtcaaccctaagccccaacatgactatatttggagacggggcatttacagaggtaattaaggttcaaggaggccgtgagggtggggccctgatccaacaggattagtgtcctttcaagaaaaacaccagaaggctccctcttgttctctatccaccatgtgaggacacagcaagccaagaagagagccggcaccagaacccactctgctggaccttgatcatggacctttctgcctcttgacctgtgaggttcactgatacggtctcagattccactccacaactactctctacaaaactatcacttgatgggttttgctgtagcatcaaagaagaatacccacaattatccgaaaagctgtgaaatactcctacctttttcaaccacagatctggctgaggctgtattttaacttcagccataagagcctatcacaacagatcaatgtctcccttaaaagacagaaactgaccaggcgtggctcatgcctgtaatccaagcattttgggaggctgagatggcaggatcaacttgaggtcaggagttcgagaccagcctggccaacatggtaaaacctcgtctctactaaaaatacaagttagccaggcatggtggtgggcacctgtagtcccagctactcaggaggctaaggcacgagaatcacttgaacccaagaggtagaggttccagtgagcccagattgcaccactgaactccagtctgggcaacagagtgagactctgtccccagaaaaaaaaaaaaaagacagaaactgggtcaggtacagtggctcacacctatactcccaacactttgggagacctaggtagaaaaattgcttgaggccaacagtttgagaccaaccctagcaacatagcaagaactccacaaagaaataaaataaaaacgttggtgaggtgtggtggcgtgcgactatagtcccagttattcaggaggctgaggcaggagcatcccttgagcccaggagttcgaggctgcagtaaactatgattgcaccactgcactccagcctaggcaaaagtgagatccagtctcaaaaaaataaataaatgttttaaagacagaagcttggccaggcgtggtggctcatgcctgtaatccagcactttgggaggccgaggtgggcagatcacaaggtcaagagtttgagaccagcctgtccaacatgatgaaaccccgtctctgctaaaaatacaaaaatttgccgggcgtggtggcatgcacctgtggtcccagctactcgggaggctgaggtaggagaatcacttgagcccaggaggcggaggatgcagtgagccaagatcacaccactgcactccagcctgggaaacagagcaagactccatctcaaaaaaataaaaagacagaagctggattttcatatttgcttctacattcaaagagatatggaaaactaaaaattcagtcttctaattttttttcttttgggacagttctttttattttcataaaaatatttatattaacatgtcactgatttattcagcctcctgagtagctaggactacagacgtgcaccaccacgcctggcaattttcgtattctttttttttcttgagatggagtttcactgtgtcactcaggctggactgcagtggcacatctcagctcattttaaaatgagttagcgaataagtatttttacatgtcaattttttttgtttttttgagacacagtcttgctctgtcccccaggctagagtgcaatggcctgatctcggctcactgcaacctccgcctcctgggttcaagcgattctcctgcct[134 bp omitted]cagcctcccaaagtgctgggattacaagcatgagccaccgcgcccaacaatttttgtatttttagtacagacagggttt[132 bp omitted]aataaaaaagcaatagataaagcacattaacaaagctccttgaaactctaattttttttaatttttttttttgagacagggtctcactctgtcgcccaggctggagtgcaatggcgtgatctcggctcaccgcaacctccgcctcccaggttcaagggattctcctgcctcagcctcccgagtagctgggactatagacgtgcaccaccacgcctggctaattttgtattcttttttttcttttttggagacggagtctcgctgtgtcacccaggctggagtgcagtggcacgatctcagctcactgcaagctccgtctcccgggttcacgtcattctcccgcctcagcct[134 bp omitted]cagcctcccaaagtgctgggattacaagcatgagccaccgcgcccaacaatttttgtatttttagtacagacagggttt[132 bp omitted]aataaaaaagcaatagataaagcacattaacaaagctccttgaaactctaattttttttaatttttttttttgagacagggtctcactctgtcgcccaggctggagtgcaatggcgtgatctcggctcaccgcaacctccgcctcccaggttcaagggattctcctgcctcagcctcccgagtagctgggactatagacgtgcaccaccacgcctggctaattttgtattcttttttttcttttttggagacggagtctcgctgtgtcacccaggctggagtgcagtggcacgatctcagctcactgcaagctccgtctcccgggttcacgtcattctcccgcctcagcctcccgagtagctgggactacagtcacccgccactatgcccggctaattttgtttttgtatttttagtagagacagggttt[131 bp omitted]caccatgttggccaagctggtctcgaactcctgatctcaagtgatccacccgcctcagcctcccaaagtgctgggattacaagcgtgagccactgcacccagcctgaaactctcaataatttttaagagtacaaagcaggttctgagaccagaagatttgagagcagctggcttaatccttgaccaccgtgctgctcagagagccccatgaaagacctggtctccactgaatttcagctactaggacagcatctggcactttgcaaaaagatgtacaatttagcacttaccaatgtggaatctgagctgcacaaaactcatgaggcttaccccggagggctccacccaacacaggggcaggatcaccttggccaagtacctgggagatgaagtccttctccagctcctccttgggcttgtctgggcacctcgaggcctcctcgcactcccccctaacactgtagttctgtgacaggatctctgcgaggttgaactgatggtctccagagcccatggacaccactggggagaagagagcagcccaggtgagcaccgtgcctcgcctgtcccaaccatcctgccgagactactgacgcctggtgaagccctaaggatgaggccctctgcatgctgccaggatcagcctcatgagggaacccaacaggacaccccacgactaatgcacacaggagcacggctggtgagctgcacatacaaattccaaggatttttttggggggtgggtgtgtctctttctgagagactgcttgtcttcctgaacacagagaagcctgcgaggatttggggagcaagtggactagaaagagaccaacacccatctcgttagggtagaaggagcagcaggactcagtcgaggtgggttcacaccggactccatgactcctgaaacgggggtgacgctgaaccctcacctgcacaggtcagtacagcatcaaggagcatgcagggacaaaccaatgggggctcgacaacaccagtcccttaagctccgtctgcagggccacatgaagaagacatgcgatgtacatggcccaacagttgacggctgtcatcagatccagggtttccccgaaagaactgggatgtgtcaccattcctctgcatgtttactctccaattggtcaaatttttaaacaaacaaaggaaatagctagggctcaatcaatccagacagagagcagtgtaggccaaggctgggggcctgagggcctgggagtccagggcacgaggcctctagggcagccacacagcctgtagggctgggcacacaggtgtgcaccacacacagcccatgcacagaacatgcagctgcagggcacagaggacccccagcggcaggcacctcgttagagtgagggaatgacctggagctgaatgggtgcgcccggaccctcagtggccaccgcacccttggaggagccacgtgagggaaaacagggatggcaccgccttctctggggactcgggtggtgactagtttgatacggaaagagacgcagccctacacctggcagaaggagcccagccaggggaagaacagtcatagagacccttgccctacagcgtcagctcctccccgcaggcccaacgcaggtggctggcaggcgggcatgggaccttgatgcccactgggcaagcagcagcgcagggaggtgcagggaacccggggtgctgcctgtctcgccgccctccaccttctcagccccggctccctcagcaagccaccccttcccaacaccctggcaagatgaggcagccctcagctcggtgcaggcgtgtgcccgggtcctctgctgggggtgctgggctctgaggatggtcttgggtcgcctgggctccctgcccctgctaaagaacaggaagacgggagtcctgaccactctgccccacagctccatctgaacgggtgggagctgggacaccctggactctggaagccagtgtgccggtccacagctcagccaggcccagcaggcattctgtctctcacagccacaaaggccttggcggacctgagcaggggaaggagggaggaaggtacctgctgttgtctgcaagcccggctcccctgggcacaggctgtgctcgaggcaggagaccacgcgaggactctgcctccccagcgaggaggcctgcgaaggaagagaggcagggttagctcggccggcccaaaacctgctgctggacatcacagtgtggcagccaagagcaagcgctggtcagagcccagtccccagtgaccagggaaggggctttgtctccgcctctgagggctggggggcactaggagcagcacacgcatgtggccgccactcgccccgcctcccaccaaggaccgctcacagggtggaggcgttctcgcccagggcaggacatgcatcatgtgacactgaaaactgcccacacacaggcctacagtcctgacccatgctgcaacctggatgaagctcaacaacagcatgcactgggagggaagccagacaccaacggccacagcgtagggtccactgataccaaacatccagaacaggccagtccacagacagaatgggggctcgtgggggccaggagccagggagagagacagtgggagagtgactgctaacggggacagggcttcttttggggatgacagaatgttttagaatcagatagaggtgatggttgcatggtcgtgaatacactaaaaatcaatgaattataaactttaaaatgggcatattttatggtttgtcaattacaatttttttttataaaaaggcaaacaaaaccattataagtt[132 bp omitted]ccttagcctcccgagtagctaggactacaggtgcgcaccaccacgcccagctaatttctgtatttttactagagatgagggtttcaccatgttgcccaggctggtctcaaactcttgacctcaagtgatccgcccgcctcggcctcccaaagtgctggcattatgggtgtgagctaccgcaagccacgatatctctcatgtacataaacacaaaaccctcaacaaaatactagcaaactgaatccagcaacacataaagatgattataagccacgaccaagtaagatttaccgcagggatgcaaggtcgatttaatatccaaaagtcaattaatataatacatcacatcaataaaataaaaaaacaaaacacaggatcatctcaacatacccaatccaacaaaatccaacatactttcataaggaaaaatacccaacaaactcagaacagaagggagcttccttcttggaaaaacccatacttatcattgccctcaatggggaaaggctgctttctccttcacaccatgagcaccacaacgtgtactctcacctctcatgctaaatggagggctggatggtgtagtca[138 bp omitted]catggtgaaaccctgtctctaccaaaaatacaaaaaaattagccaggcattgtggcatgtgcctgtaatcccagctactcaggaggctgaggcaggagaattgcttgaaccagggaggcggaggctgcagtgagccgagatcgtgccactgcactccagcctgggcaacag[141 bp omitted]aaaccctgtctctactaaaaatgtaaaaattagctgggtgtggtggcgggcacctgtagtcccagttactcgggaggctgaggcaggaggatcgcttgaacccaggaggcagaggttgcagtgagccgagatcgtgccactgcactccagcctggcaatacagcaagactccatctcaaaaaaaaaaaaaaaaaaaaaaaaaaaagattggtaaggaagaagtaaaactatctctgtgctggtgctggtgacatgatctaaaaaactattcaaactacagtgagttcagcaaggttgcagtacacaaaatcaatacataaaaatcaattttatttctatataaaagcaacaaatacaaaaagaacaattccatttacaatagcatcaagggaagtgtgaaatgtgtacagtactctgagtgaacaaagcagtgttgaaaggaagatccaagggaatgtaaaggcatcccacgttcatggctgagaagacaacattaagacggcaacaccccccactgattgacaaattcaacaccatgtctatcagaaccccagttggcttctttgtagaaacccacgagccgatttcaaaagcatatggaagctcaaggtaccccaaacagcccaaacaatcttgaaacaatacttcctgatttcaaaattcaccacagagccacagcaatcaaaacagtgtggtactgccataaggacagcacaaagatcaacgaactagaactgagaatccagaaatacagtcacacattcatagtcaactggatttccacaaaggtatcaaaacagttccatgaaggaatgaacagtctttaacaaatggtactgggacagttgaatatccatgtgcaaaagaatgaagttggacccctatctcataccatatgcaaaaattacctcaaaatggatcaaaggccttaaatataagagccaaaaccacacaacttttcggagaaaatatatggataaatatttgtaaccttttgattgaatctaaaaatgtggtgggaaaaaagtttgtgaccttggatttggcaatggtttcttagataagacaccaaaatcacaagtgaccaaaaaaaaaaaaaaaaaccaaatggataaacaacttcaccaaaattaaaaacttttgtgcttcaaaggacgcccccaagaaagtgaaaggacaactgagagaataggagaaaatatctgaaaaataatctatctgataaggaacttcttctcagtataaagaacgtttaaaactcaataaggaagagagaatcccattgaaaaataggcaaaggatctgaacagacatttctccaaagaggacagacaaatggccaataagcacaggaaaagatactcaatgtaatatcaggcaaaagcaagcaaagtccacactacgataccacttcctaatcagagaataaaaactgtgctcaaaaagacagtaacaagtgttgacaagaacgtggacaaagtggaactctcctgtgccctgccggtgggaatgtcaaaatagtgcagccactttggaaaatagtccagcaattcctccaaaagttaaatagtatttaaccatgtgacccaggtcagggtcctaatatccatcagctgacaaaaacaaaacaaagcactagcaacggggcaaagaaggacgcactgacacactaccacatggacgcacctcgaaagactcatgctcctgaaacagccagacacaaaaggccacgtgtcgtatgactcatttaatctcaaatgtctagagcaggcaaattcgtagagacagaaaatggattcctggtggaaaggggctgggagttgatctggggtttggggagtgaccactaaggggtgtggggttccttttggggtgatgaaaatgttttaaaattgactgtgatggtggctgcacaactgggtgaatacactaacaaccactgaactggacacattaaaacggtgaactgcatggtaaatgaattatacctcgggaaagctgctgccaaaaagggtagattaaaatatttaatgaagtttaaaaacttgtgtagtaagaatttcaatacttcttcacgggtcctcaagaaaaaacctcacaggtggtataatcattcccctcacaaaaaaacaaggaaacaagctcaaagagatagagtcagttacccaagctcacacagcaggttcagtggtgcagttacaaagtggagctcaggccagcggcttgcaaacaccttccagcccatcacactactggggaacacaacggctagtacagttgacccttgaacaacgcaggggttacgggtgccaaccctccacacaggtgaaaacccatgcatgacttctgactccccgacacttgattaatagcctcctgctggtcgggagcactgccgataacatcaacagttgataaacacatattttatatattgtattatgtactgtattctcacaaaaaaagtaaactacagaaaaagttattaagaaaattgtaagaaagagaaagtgtatttactattcattaagtggaagtggatcatcctaaaggtcttcgtcctcatcatcttcacgttgagtaggctgaggaggaagaggaggggttggtcttcctgtctcggggtggcagagatggaaggaaatccatgtataagtgacccatgcagttcaaacccgtgaggttcaagggccaactgtacagcaacgtacagcaaagccacggaagggagctggggcagccactggccctggagtgactctggcaacaaggctgccaaggaccaaggagcacctcaagctctaagtggagactgacaggacccatccagctttagaaagtttagctccgtggtggcagagggcaaacagaagacagagggaaggaagagccagcagggcccccagggggaaggggccacgggactggaagcaagcagcacagagtgcatggcagctgcaggggcatctcacgcctcctgccctggggttggcctgggtctggcagagatggcctcacctctttccaggacacagcaggtggccaccagcccacaaccactctacacagccacacgcggtgtgaagccacagggaaagcatcctaagtgacctctgaaatcaccctcagccccctctaggaccctctgggtaggggtcgaggacaggttctctgggcaacggttcctgcctcagtcaggggctggctttctactcccgcaaccaggagcctgactaacaaggggatggcaggcgaccacatcaaatgaggccccagtctggacggcaagttgacaacagtcccgcaggcttgagatccacaccgagtaacagggagttaacatatggccccaggagaggtggtctgcagggtctgaggaggatctggcccttatatgacgtgccatttaacaggagagctaaggcagaggggggcaaagagggaagcggctgggaacggcagaaagggccgctaacagggaggccctgagcagcctgggatccccaagttcatttccaggcgactctgagttcctggaacttaccacggaatacagacttcatggatcttcttcctcccgctgcccctgcctggtgtccaggtgcaagtctactctcaaagcaggttcccagggactctacttcactcactcagaacactctgcatgtttccctctgagttcactcccaggaaagacaaagtcctctgttttgtcaaagtggaagcaggaaaaagagggggagcaggccaacggtattccaggcaacaaaaaaagcaaaggaagcgtaaacagcattctagaaacaaggtccagaggacaacaggccacagacccaggcgtccaccagggtcttcaggcagtagaagcggcagccagctactcaacataaagactgcaccagaggactgggtgcagagcacagaccagcccttcccccagggcagcccccacaggtatagagtgcaccaaaaacacaagaggccaccctgcaaagcttaacccaaaatgacagggtggcaggttccattcgccaagatggctgcacctacctctcccatgccccaagccctctccccagtgtgactgaaacaacctcctcctaagagccatgcttgaccctcctcccacccacaccaactcaagtgccaggcgcttgttggactacccagcaccccactcctccgtctgaccaatgttccctgggcgcccactctgggctcagcaaggcagtggcgtggtggttaacctgagaaacaagttccacctgcctccacccacatggagttgctagttttggacacagacaacaaacaagtggacatgtatggtaccgagaagagaaaacagggcgcacgggctctgcaactgcgggtcagggaaggcctggggggcctcagtcgaggtggaaccatcgttggcagcccccaaatgggtagagtgcaccagcaaacaggagcccagggccctagagtagggggcagatccgtggggaccacctcacagggctgtgggactcagcaaggaggagcattttatcccagggaccatgaaaagccatggagggttttaggtaggagcaaaagatggtgctcttaggtttttaaaagatcaatctagtatgcctgagaaaagtatgaagcattcccgtctgccactgtggtgcttatgattattctgggatactgatacagaataaagtagctagtactgatcacgtgctataaagttacaaattgccacttttacgggttaaaaacagtggaatatcgtcaacttcacaagattcaacttccatgtacaagccgttgtggcaggacctcatcagacctcctagctctgaagggtgaccattaaacttcccatttcagagatgaggaaaaggaagttctgagtcactgggcaacctgcccaagaccacacagaacaagtccggtggtcagacagcttgccatggctcctcacgctcagcacctcatacttgttggtcctaacccacccacgtctctctctgaccagactctgcatccctgtaggagaggccctgtctgctccattcactcccagatcctcaggccgaggacagagcgggacctccttagaaaatcaaatcaaattcactcaacagggcaccaccccaaagtgtaaaacagggttaacaggagcagccggaccacaagctgctgtgcacatttacggagctcagcctagagcagggcagaacagccacatggcagctctgggggaggctggcttgggagtctgacttgtgccatcccagacacagagctacctgtcaggccacgtgtgttgcccagattccaggagcacaactcattcgaccaccacgtcgctgcagggccactgggagacgcggcttctgcctccgaccctggaggacagccaccatctgcatggggactcagtctccctaagcgtctcaagaagaactaattctcgatgaaggaactggccggtggtctggcctagtatcgagacacctacaccgtctttggcataaacacagggcctgttactgcccctgaggtcgtcaccagggggagagaatggccagtcctgcctcccacaacgcccaagacataaacacgcaacgtggcaccacggccaggccgcagttccaatcccggcttcccacgaggcggctgtgcctggctgggtgggcaccttttcctttgggctctatcccagagataggatcagctcttgagtctgcccgcctgtcgtaacttctgcgcacagaagtcatgcactgagtcccactgactgagcacctcgcagccgccgcaccttcacctacattatctctttccatcttcaccagggccctccaaggtgaaagcaagtccacacaggctcatccaccactccaaaatcaaaaaaagcttcaaaagcgaaagtttcttccttcctggtttgacctgacacgaagctatctgttgtcttatcctagacagtcctaggtgggtttgatcaaacatcacagtccaaaatcccacagatcctcaaattggaaaaattctggattccaaaatatagctggtcccaaacatttcagataaagggtcccgggcttgtttcctggacgagggaggaggctccagaagtaacttcgtgcccgggagaggctggtccaactcttctgagatcagccccgacgctctctaggccccggcagacccacccaccctgcgcccagttcgcgccaggcgggtccgcgtcgggagttcaaatcccgcccggggtctgacccagccccgccggggggctcgcgggcggcggaggcgcggtgggtccaccgggatcccgatggggagcgcggggcgcctggcggccccagcactcggcaaagttggcaaaggcgcgggaggggaggcctgcgcgccgcggggcccgggccggggccgggaaccggagccggaccctggaacggagccgcgcgcccaccggacccccgacaccagccccgccccgcgtccctcccctcccccaccccggcccccgcccgccccgcgccgccgcgcatgcgcactgcagcccgcgatgtggcagccgggggagttggggggtgggggccggccgggggcggccgccgatggagccccgcgcccctccggccccggacgggccaggcgccccggccggcctcagagctccagagcggggctctccgtccctggggcccacgacgaggccgagccacggcggcggggggcgcggacgcgcgggggcggggggccggctcccccggcccgctcactcacctccgccatggccgtgtgtgcgcgggaggcggtggccgcgccgggatccccggatgaggggccgcgcactcattggctgtggagcctggagggcggggcagggggcggagcctggagggggcggagagcgggccgggcgcgtagtaggtgcgcgggcgcgggcgcgggcgcgcagccgagcgtggccggcggcttctggcgagcttgcggtgtctttccggccgtctctgctggaccctgatcttggccttggccttggcggaggagactgcattccataaaaatacgaattcctgataatcacacctgcgtggggaccacgtggtcctgtgtgacctcttcattccctcggctgctcgctgttaataccccgcgtggcagactaggaaactgaggcccagggcgacgggccacccagagtgtcagtgatagagccagaattggtgtccgggctgcgtggttctggaattttctgcactttcgcacccgtgatgagcaaactagcgcgcggaggaaccaatcggggagcttgcgaacgcgcaccagtcggagaggttttagaaacggtggccccgcgccggagagcccaaggcgggaggcagggaggtgggcttgaccccagggccatttggttctgcagtccgtcgtttcgcagattgaacatttctggaacacgtgcacgttctgatcctgagggtttgaaggagacagccctaacgcctgtcttcagggcgtttagagtggaggatgggaaggcaaggactcgccacaccttaaatttgagacggataagtgccgtgaatcttcggggcgcacgatgcagagagaggataggaagcaggggtggggcgtgaagaggcaggggccaggtgggagctgtggggcctggaccagagtgcagagagacttgagaaggtggacaccacaagactcgctgatggagggaagctggagagagtgaaggatggcctccagatgtctggcttgcgcaaatgagtggagggcggttcctactgagaccaggaagaagagaactggagaccaggaagaagggaattggggaccaggaggaagggaattggggaccaggaagaagagaatgagtctcattcctgtttcccagtgatcagccaatgaatagtgagaacttgacatgcatcagccttgattcctgatgcaaaatcattactcagtcctctgagaattcaccaaccaagagatagaagaaccactctggaggggtctaccctcactccttttttggtttacatcattgagattgagggttctggccctcgtgttgaagagtcctcactgatttgtgcaagagttggttccttcctttattattcatttgttattattcattcagtcattcagtgaactaaacacatatcttatgcagtcctcaactgggtgctgggtagccagaggtcctgtgaagcagggagaagcatgaacagataagagagtgaggtgctgtgctgtaacaggtggaggggcccgaagacaagggcttgagtccacctggcaaaacgagggaagactcttaggagagggcttggcaagaatcatcacatagatgtcaaatgaggacttgggtgaagagaagggtattgtggcttggaacggtgactcacacctctaatcctaacacttggggaggcagaggcaggaggatcacttgaggtcaggagtttgagaccagcctgggcaacagggtgaaaccctgtctctactaaaaatacaaaaattatccgggcgtggtggcgagtgcccataatcccagctattctgtggaggctaaggcaagagaatcacttgaacctgggaaggcagaggttgcagtgagctaagatcactgcactccagcctgggaaacagagtgagacactgtttcaaaaaaaaaaaaaaaaaactttaaacattagagggcatgacgataatgtgcctgtagtcccagctactctggaggccgaagtgggaggatctcttgagcccaggaggtcgaggctgcggtaagcagtgattgtgccactgcaccccagcctgggcaacagagtgagacctgtctcaaaaaaaaaaaaaaaaaagagtgaaggatattttaaggtctgaaagtctgtctccgtagactgttagtcgcagtggagaaatgaagccacttgttgggtgggtgataaaactcagcatccctggtaaagggcaggtgcacaccatgtgcacctggatgtggtgtccaaagcaggacacggcatcactgaatccagccagcaatgcacaacccatatctacatatgaggaaatttcagacaaacccaaataaggaatattctgttaaacaaaagagggactgtattcttcagaaatgttaatgccacaatggggcgtggtggcgggtgcctgtaatcccagctgctcaggaggctgaggcaggagaatcacttgaacccgagaggcggaggttgcagtgagctgagattgcgccactacactccagcctgggcgacaagagcaaaactccatctcaaaacaaaacaggccaggcgctgtggctcacacctgtaatcccagcactttgggaggctgaagcaggaagatcacgaggtcaggagttcaagaccagcctagctagcatggtgaaacctgatctctactaaaataatacaaaaaattagccgggcgtggtggtgcacacctgtagtcccaactactcgggaggctgaggcaagagaatcgcttgaaaccgggaggtggaggctgcagtgagccgagatggcaccattgcattccagcctgggcgacagagcaagactccgtctcaaaaaaaaaaaaaaaaccacagcgacaacaacaaaaaaaagttaatgccagaaaagataaacctgtgtaaatctttttttttttttttttttttttgagatggattctcgctctgttgcccaggctggagtgcagtggcacaatcttggctcactgcaagccccacctcccgggttcacgccattctcctggctcagcctctggagtagctgggactgcaggcatgtgccgcacctggctaatttttgtatttttagtagagatggggtttcaccat[134 bp omitted]ttccatgagcataaaatgaagtaaaactcagaaaataaagagcagcgaatcttgagcagggagcttaaggggagaggctggagagggtgcccctggccgtggcacagtggtttgagtggacacctcacgttggaggagatacgcctgcatgtgcctccactccaggctccctgtttcttctctgcctggttttcatggtcaccgggcagctcccaagtttgacagaggcatggtgtcccgggatgagggtccaggtcaccgcatcgctacacctcttggagcagatggagactgcgtggtggagctgggggtgatgaatccattgcagccccgaggcggggaggcaggggacgctgtagttcacccaagcagtgtcgttcttgcaaattttccctagaaaaaagaggcctcacaagatactggaggagctgtgagtagtgcatggggtggcctgtggtggatgctgggtgcatcatcaaaccctcccctacacaagcactaacttccccctctgctcagggtcaagtatccctctgaggggcggcccacatcagcgactggctggtacagatccataaagacccaggcacctgtgaccaactggggtcaaccgtgaggctgcagagctcctgtaggattggaggcggcttggtcatctcagctcgctcctccctccctccagccctgcttccttcactctctgacaggtgttgaccccaagggtaaccccgacaatattcctgcacataatctttgtctcgcagtctatttcctggagacctaacccgtgccacaa[146 bp omitted]cccatctctactaaaaatacaaagattagccgggcgtggtggcgggcgcctgtaatcccagctactcgggaggc[144 bp omitted]gcaccacggatgaggtagtttatatatacatattttaagaacacatttatttatcacagttctggaggctggaaagccttgatcaaggcgccggcagttttggtgtctggtgagagcctggtctctgctcccaaaatggtgccttggtacagcatcctccaaagggaggaacactgaaccctcacatggcagaggggatgggcagagagtgctccctttgacctcgagccctttttttttttttttttttgagacggagttttgcctttgtcacccaggctgtgcaatggcgtcatctcggctcactgcaacctccacctcccaggttcaagcaattctcctgcctaagcctcccaagtagctgggtttacagatatgcaccacgacaccaagctagtttttatatttttagtagagatggggtttcaccacgttacccagg[134 bp omitted]gcagagccctgatgtcttaatcacctgccaaaggtcccgccttttaatacaattgcactggggattaagtttcaacatgaattttggaaggacaccgtcattcaaaccatagcaagaagcaatacaaattgaaagtataacataatgagagagaagaggccataaaagagaatgaatagaaaaaaaaatagtccctggtgtggtggctcacacatgtaatcccagcactttgggagactgaggcgggaggattgcttgagcctaggagatcaagaccagcgtgggcaacataatgagaccccatctctaccgaaaaacaacaacaacaacaagaataacaaatatacacacacacacacacagacacatatatatacacacacacacatatatacagacacacatatatatacacacacacacatatatatacacacacaaatatatatacacacatatatacacacacacacatatatatacacacacacacacatatatacacacacacatatatatacacacacacacatatatatacacacacacacatatatacaaacacacatatatatacacacacacatatatatacacacacacatatatatacacacacacacatatatatacacacacatatatatacacacacacatatatatacacacacacatatatatacagacacacacatatatacacacacacatatatacacacacacacatatatatacacagacacacatatatatacacacacacacatatatatacagacacacacatatatacacacacacatatatatacacacacacatatatacacacacacatatatatacacacacacatatatatacacacacacatatgtatacaaacacacaaatatattaaacacatacacacaaatatatatacacacatatatacacacacacaaatatataaacacatacacacaaatatatatacacacacatatatacacacacatatatacacacacacatatgtatacaaacacacaaatatataaacacatacacacaaatatatatacacacatatatacacacacacaaatatataaacacatacacacaaatatatatacacacatatatacacacacatatatacacacaaatatatacacacatatatacacacacacaaatatataaacacatacacacaaatatatatacacacacatatatacacacacatatatacacacaaaatatacacacatatatacacacacatatatacatacacaaatatagacatacacacacaaatacatacacacacaaatatatatacacacaaatatatatacacacatatatacacatacacaaatatatatacacacacacatatatatacacacacacatatgtatacaaacacacaaatatataaacacatacacacaaatatatatacacacatatatacacacacacaaatatataaacacatacacacaaatatatatacacacacatatatacacacacatatatatacacacacacatatatatacacacacacatatgtatacaaacacacaaatatataaacacacacatatgtatacaaacacacaaatatataaacacatacacacaaatatatatacacacatatatacacacacacaaatatataaacacatacacacaaatatatatacacacacatatatacacacacatatatacacacacacatatgtatacaaacacacaaatatataaacacatacacacaaatatatatacacacatatatacacacacacaaatatataaacacatacacacaaatatatatacacacacatatatacacacacatatatatacacacacacatatatatacacacacacaaatatataaacacatacacacaaatatatacacacaaaaaatatatacatacacaaatatagacatacaaatacacacacatatatacacacaaatatatatacacacacatatatacacacacaaatatatatacatacacaaatatagacatacaaacacatacacaaatatatatacacacaaatatatatacacacatatacacacacacaaatatatatacacacaaatatatatacacacaaatatatatacacacacaaacgtgtatatacacacacatatatacacacatatataatactaaaaaagaaaaagaaatataaaacaaaagaaagcaaaacaaaatagaaagtgtaacaaatatgatgaaaaacaaagatgaagcatttatcctatcgagagacttaaataggctaaactcagaaaggatcagaggacaaatctcaaccttatgagcgaacgtaggagtaaacctaagacacagtgagtcacacggcgttcccgtccacgaggcacgggtgcctcaccaccagcatgctggtgggtgatctagctcccaaatccaactttagaatctactttctcaaactccttttgcaggtcagattctccaggaagtgaatgctgaggtagagatttgtatgcaggaaattctgacgcgagggcccacgggatcggcacctgtggggaagtgaaggcagcagggcagagagagaaggatctgcagcacagttaccgcggaggcttcggctgtggagctgggctggcccctcagagctgtatcctacgggggcacgggacaaaggctttgtacccatgcattgaccagtcattggggagggagagaaggtgaccacggggtccagttgtcttcaggcaaggacatttcccagaggtattgtcttccagaggctggaggacgagtgctgagttctgggggggatcttctggctggtgtgccacagctccactacatcttgttctgagaatttaaatggcttgtatttttcttctagtgatcacctttataattataatttcatataatctacttaattccattccttcagaccaacactgtctaacacgaatgtgatagaatttaacattttctagtaaccacattaaaaaggtaaaaagacacaagtaaaattaattgtaatatgttatttaatacaaatatctgtaaagtattatctttcccatgtgtaatcaatataaaattattgagatatttacactctgttttccatactgctttcaatctctggtgtgtgtttcacacttataggacatcacaattcaaattagccacattttacttgcccgcgaaccacatgtggctacaagactgcacagcacagctttagatgctgacactgtttctatctattgactctagtgtttaaaaaaaatgacattaggatacttctgctttgccctattccccctctcctacataacagaatcctagttaattacattgattttcttcctgtttaacattatgctcttaaatatacttacatttctattattggaataatccatttaaaataatttttttgatggggaatgtgtataactgtaccacttcctattatctctgctcccctcactttttgttaaccataccctttctagtttcaagatttataacatctacatttgtagccactcttcttagatttgatttaatgccagtcctcaaggtgaatggactcagctctcagcatcagttctcttgctgtggcttctccattttctctcagttggctgaaagtcattcttaaatagtttcttcaggaagttccttcaattcttgcatgctctaagacatttgtctgatgtctttattttatttatttattttttgagacggagtctcactctgtcacccaggctggagtgcagtggcgcaatcttggctcactgcaacctccgcttcctgggttcaagcaattctcctgcctcagcctcccgagtagctgggattacaggcgcctgccaccacgcccagctaatttttgtatttttagtagaaac[141 bp omitted]tgggtataaaattatttctccagaccatcttacttcaacattaagtcctccagaactttgtagacatttttctattgacttctagcaatgaatgttgctgaaataaagtctggagagaggcttttcccttttaagtctcttggtcttattatcttgatgcactcaggtataagccatttagtatcatttttcttgggacatggtgagttattccaatatatagatgaaaatcttcttgtaattctgggaagttttcttaaattataaatttaaatatttgctgcgttccattattttgtatctcttcttcgtgaatatcatttttatatatgtagtatggcctttttctagcttccaaatctattatcttctctctgacccttcatgatgatctgctattttcatgcattgtgttagctttgtcaatcctgttttccatgtccttttactattatgtcttctgcaatgtcagttctccttaaggcaatttagacttcattttaactaatttagactttcattttttcttccatttctttcctaaattctgcaacctcatgttaatctccttctgtttcctttctgtatcttctatgaactgtattcctgctttgtgataatttatttaaatatttggtgatttttttttttttttgagagagggtttcactgtcacccaggctggagtgcaatggtgcaatcttggctcactgcaacctctacctctcgggttcaagcgattctcctgcctcagcctcccaagtagctgggattacaggcacccgccaactcgccaggctaatttctgtatttttagtagagatggggtttcaccatgttggccaggctggtcttgaattcctaacttcaagtgatctgcccacctcggcctcccaaattgctgggattacaggcatgagccactgtgcctggcctgtatttggtgatttttaaacaatacttattttctctgtgacatctttatttcaatcctatccttttctttttttttttttctttttttgagagatggagtttcactcttgttgcccaggttggagtgcaatgatgtgatctcggctcaccacagcctctgcctcccaggttcaagcaattctcctgccttagcctcccaagtagctgggattacaggcatgcgccaccacgcctggctatgttttgtatttttgtagagacaggggtttctccatgttggtcaggctgatctcgaactcccaacctcaggtgatctgcccgcctcggccttccaaagtgctcagattacaagcatgagccaccgtgcctggccttaatcccatcctttactttctcatctttgaataagggtgatctccctaaaccagcctttattaggaggttatatgatgatcaagccaggactctgctcctgttagtaggaatccttctgtgacacagtctgtgtgacagtgagttattttagcctttgttgttctctgactcagcaaggctggcacagcagagttgttcagaaggcaaccccatgccagcacccagtttacgggaagattccttcctcctgcaaatatgatttcacatggcagttactcattcagcctgcattcccttcttcctgaagtttcacgccaaaccgaatctatagaaactcctactgccagcctattcctaatattattattattattttgagacggagtttcactcttattgggcaataagatctcggctcaccacaacctctgcctcccaggttcaagcaattctcctgcctcaccctcccgagtagctaggatcacaggcatgcaccaccacgcccggctaattttgtatttttagtagagatggggtttctccatgttggtcaggctggtctcgaactccgacgtcaggtgatccgcccgcctcggcttcccaaagtgctgggattacacgcgtgagacactgcacccggccacctgctcctaatattctgagaaagaattattagtgttgcccccagacgatggatgtattttggaaaactgccctaccagctttgtctgagatctgagcccatagacaccctttcccagcatttctgacacccttagtaaccttccctttatcattaatttgttttcttatcagttcaaggtcacagatgtcatcacgtttcttcaaagataggtgtgggcatctccatttctcattcctgtaacttcttttggatcgtgatgcccctgcaggactacatcgctgtttacttgctcccctattggtggacattccggctgcctcatttttcataccagctgtcactgtctctgtatatctctatctatctatctgtccattgagagagagcacacatttaattctttggttaatttatttgctttttttcctaaacaagagcaaagcaatgttttccagtacaaattttgttgccaaaagtcaagaagaggccaaaagtatagaagcatcgtttgaagctgcagtgcccatagtgaaaaaacaggagcaagttggtctattgaaaaaaagccatgaaattcaacacaaagttctttctttctttctttttttgaaacggagtctggctctgtcacccaggctggagtgcaatggctcaatctcggctcactgcaacctctgcctcctgggctcaagcgattctcctgcctcagcctcccgagtaggtgggattacaggcacccgcca[137 bp omitted]cgcctagccctttaatttaatttgatttatttttaatttttatttttatttatttatttttgagacagaatctcactccatcacccaggttggagtgcaggggtgctatctcggctcactgcaacctctgcctcccgggctcaagcgattctcgtgcctcagcctcccgagtagttgggggttataggcgcccgccaccacgctcagctaatttgttttgtatttttagtagagatggggtttcaccatgttgcccaggctgttcttgaaatcctaacctcaagtaatctgcccacctcagcctcccaaagtcctgggattacaggtatgggccaccacgcccagcccagcaatgatgagttttaaagaatatacaggttattttgtttttattttattttttattatttttttgagacggagtctcgctctgtcgccaggctggagtgcagtggcgcaatctctgctcgccgcaagctccgcctcccgggttcaagtgattctcctgcctcagcctcccgagtagctgggactacaggcatctgccaccatgcctggtgaattttttgtatttttagcagagacaggttttcaccttgttggccaggctggtcttgaactcctgacctcatgatccacccacctcggcctcccaacgtgctgggattacagtcgtgagtcaccgcaccgtgctggttttggtgggcatcacctgtccttggctctaatagaggatgttacagaaatcgtgtaggcgcaggtttaggtgcaggcacaggtgtaggcatagcacagtgtaggtgcaggcacaggtgtaggtgtaggcacaggagtaggtgtaggcacaggtgtaggcatagcacagtgtaggtgcaggcacaggtgtaggtgtagcacaggtgtaggtgtagcacaatgtagttgtagcacaggtgtaggggtagcacagtgtaggtgcaggcacaggtttaggtgtagcacagttgtaggtgtaggcagagatgtaggtatagcacaggtttagatgtaggcaaaggtgtaggtgcattgtaggattaggtgcaggtgtcagcacggggtaagtataggcagaggtgtaggtgcaggcacagatgtagttgcaggtacagatgtaggtgtatattttctcttggaaatagcaaagcaccggccagacatggtggctcacgcctgtaatcctagcactttgagaggccg[134 bp omitted]gaagcaggagaatcactggaacctggaagtcggaggctgcagtgagctgagaccacaccactgcactctagcctgggtaacaaagtgagaccctgtctcaaaaaaaaaaaaaaatcgaagcaccttgaaactctacagtttcaatcccagaatccattacccactctcatgtttaaaagaaagctcctcttcccatgttccctatcttggtaaatggtgatgccaccccatgagaaacagggtactctctgcttctttcagaaacgccacagtctatttatttatttatttattttgagacaaagtctcggtctgtcacccaggctggagtgcagtggcgtgatcttggctcactgcaacctccgcctcccgggttcaagtgattatcctgcctcagcctcccaagtagctgggactacaggtgtccaccaccacgcttggctaatttttatatttttagtagagatggggtttcgccatgttggccaggctggtctggtactcctgatctccggtgatccccccaccttggcctcccaaaatgctgagattacaggcgtgagccaccgcggccggccctgatcattttatttcacccagttctgacactgtacttcctgaagatctctcctatccagccatgtcacctacttccaggctacagagaaattgagagtgccaaggaagccgccactgtctgtggttggcagaatagcacctcaggaacgttcccagcccagtccccagtcctgtgaatgggtcgccttaaatgatcaaggacgttcccaggcctgtgaatgggtcaccttaaataacaagagatttgcagatgggattaaggatgctgagatgagagattatcctgatgacccaggtggcccaaggtcattacagtgtcctcaagagaggaggcaggagggtgagagtcagagagaagaggctgtgctggtggatttgaagatgaaagacctcagcccgcaaccccacaccagggaggcaagcgcctccagatgccagaaaaggcgggaaagggactctcccctggggcctctggaagaggcagccctgctgatacttggactttagcccaagtgagatctactttggactccatcctccggaaggataagagaataaatgtgctttttgttgttgttgtttttgagacagagtcttacagtctctctctgtcacccaggctagagtgcagtggcgtgatctcggctcactgcagcctcaacctcccgggttcaggagcttctcctgtctcagcctcctgagtagctgggattacgtgcatgcgccaccacacccaattaatttttgcattttcagtagagatggggttttgc[134 bp omitted]gtttgttacagcagtggccagatgctaacatgggaactgtctttgtccgtttgccccgctgtaacaaagtaccatagaccggtgggttagaaacaacagaaggttatttcccacagtcctggaggctgcaagtctgagatcagggtgccagcatgatcaggtgctggtgacgggggccctcctggttgcacacaccacctgcttctcagtgtcctcacatggcaggcaggggccactggtgtctcttgatcctcttttataaggacaccaatcccatgcatgacagctctgctccataacctcattgcctccccaaagcctcacttcctaataccatcaccttgagggtgggaattacaacatatgaatctgggggagacacaggcgttcaggccatagcagggactgggggtcttttcctaacctatttgagcctcaatctccacgtctgtggaatggggacaatgataatccctccatcattaggtcactctaaagatccataagttgtgcaacaggtgtcagctgctttgactgtggctgtcgttccgactccgacggtcccgtggcccctcagcaggagcgtcggctgctttgactgtggctgtcgttccgactccgacggtcccgtgggctctcagcaggagcgtcggctggtttgaccgtggctgtcgttctgactctgatggtcccgtggcccctcagcaggagcgtcggctgctttgactgtggctgtcgttcctactccgacggtcccgtggcccctcagcaggagcgtcggctgctttgaccgtggctgtcgttccgactccgacggtcccgtgggctctcagcaggagcgtcggctggtttgaccgtggctgtcgttctgactctgatggtcccgtggcccctcagcaggagcgtcggctggtttgactgtggctgtcgttccgactctgacggtcccgtgggccctcaggaggagcatcagctggtttgactgtggctgtcgttccgactccgacggtcccgtgggccctcaggaggagcatcagctggtttgactgtggctgtcgttccgactccgacggtcccgtgggccctcaggaggagcatcagctggtttgactgtggctgtcgttccgactctgacagtcccgtgggccctcaggaggagcgtcggctggtttgactgtggctgtcgttcctactccgacggtcccgtggcccctcagcaagagcatcggctggtttgactgtggctgtcgttccgactctgacggtcccgtgggctctcaggaggagcgtcggctggtttgactgtggctgtcgttcctactccgacggtcccgtggcccctcagcaggagcatcggctggtttgactgtggctgtcgttccgactccgacggtcccgtgggctctcaggaggagcgtcggctggtttgactgtggctgtcgttccgactctgacagtcccgtgggccctcaggaggagcatcagctggtttgactgtggctgtcgttccgactccgacggtcccgtggcccctcagcaggagcgtcggctggtttgactgtggctgtcgttccgactccgacggtcccgtggcccctcagcaggagcgtcagctggtttgactgtggctgtcgttccgactccgacggtcccgtggcccctcagcaggagcgtcggctggtttgactgtggctgtcgttccgactccgacggtcccgtggcccctcagcaggagcgtcggctggtttgactgtggctgtcgttccgactccgacggtcccgtggcccctcagcaggagcgtcggctggtttgactgtggctgtcgttccgactccgacggtcccgtggcccctcagcaggagcgtcggctggtttgactgtggctgtcgttcctactccgacggtcccgtgggccctcaggaggagcgtcggctggtttgactgtggctgtcgttccgactccgacggtcccgtggcccctcagcaggagcgtcggctggtttgactgtggctgtcgttccgactccgacggtcccgtggcccctcagcaggagcgtcggctggtttgactgtggctgtcgttccgactccgacggtcccgtggcccctcagcaggagcgtcggctggtttgactgtggctgtcgttccgactccgacggtcccgtgggccctcaggaggagcgtcagctgctttgactgtggctgtcgttccgactccgacggtcccgtgggccctcagcaggagcgtcggctgctttgactgtggctgtcgttccgactccgacggtcccgtggcccctcagcaggagcgtcggctggtttgactgtggctgtcgttccgactccgacggtcccgtggcccctcagcaggagcgtcggctggtttgactgtggctgtcgttccgactccgacggtcccgtgggccctcaggaatggacgaataagtctggactgaagagattcagaaggcgctcgagatggtcaatgaaagtgactcggaaaataaacagctggacaagtcgcaggttggatgcaaaaataaatattattgtcctcctcatccttcttttggccttctagcccgccctcccttctccaggccaaaaagctcagaataatcacatacacagggttagggtgcctgagggtgtttactgggagcggaggtcttagaggccaggcctgggttgatcacacttttctggtgatgcttttgggggtggcaagctcatagaggcgaggggacgcctgtcgtatccctcgttgaggcccttgcgcactttgggcttggccagggagatgatccgggggctggccaccaccttcttggtgacatccagcacctcccagcgaggatctcggtcaggaacgcacttgtccgactgagctttgggccctagtgggggcagaagagaaggacagcactgaagctcaaacctcaaagctccacattcaggctgggcatgggagctcacacctggaatcccagcactgtggaaggctgaggcaggtggatcacctgaggtcaggagttagagatcagcctggccaacatgatgaaacctcgtctctactaaaaatacaagaattagctgagcgtggtggtgcgtctctagtcccagctactcgggaggttgaggcatgaggatggcttgaacttgggaggcagaagttgcagtgagcgcagatcgcgtcactgcactccagcctgggcaacagagcaagactccatcttaaaaaaaaaaaaaaaaaaaaaaaaaagctcccccattcaaacggcctgctcatcagcagagaaacggaggatgaaaatgtagtccactcagagtggaatatgactcagccaagaaaaggaacgaggctctagcaccagctacagcatggctgagccttgaggacagcatgtgctgcgagagaccagagacacgaaaggacacacagtgtgtgattccatttatacaaatgtccaggacaggccaatccagagtccggaagtgaacgtgtaggtgccaggggctgggagacgggaatggggagtgacagctgatgggggcggggctgccttctgaaggcataaaaaggttctgaaattgactgtggtggtggttgcataaccctgtgactgtactaaaagccactgaaa[131 bp omitted]gcctcagcctcctgagtagctgggactacagacgtgcaccaccacagccagctaatctttctattttcagcagagacggggtttcaccatgttggccaggctggtcttgaactcctgacctcaggcgatccgcccgcctcagcctcccaaagggctggcattacaggcgtgagccactgtgcctggcctattttttattttatttcattttatcattttattttactttattattttatttcattttgagacagagtcttgctctgttgcccaggctggagtgcagtagcatgaccttgactcgctgtaacctccgctccccaggatcaagtgattctcctgcctcagcctcccgagtagctggggctacaggcgcccgccaccacgcccgactaattttttgtatttttagtagagacagggtttcaccatgttggccaggctggtctcgaactcctgacttcaggcaacctgcccgcctcggcctcccaaagtactgggattacaggtgtgggccaccgtgcccggccccattttattttattttgaggcagggtcttgctgtgtctcccaggctggagcacgatctttagctcactgcagcctccacctgacttgaactgctgggttccagccatcctcccacctcagcctcgcaagtagctggggctacagtcatatgcactgccacatcgagctacgaaacctacacttaaaacagggtgaattacaaataaaaaatatttcggttgggcgcggtggctcatgcctgtaatcccagcactctgggaggccgaggcgggcggatcacaaggtcaggagatcgagaccatcctggctcacacggtgaaatcccatctctactaaaaatacaaa[138 bp omitted]agagcgaagctctgtctcaaaaaaaaaaaaaaaaaaaagaaagaaaaaaaaagaaaaaatattttaaacggccactggcagccaggctcaatggcacatgcctgtcattccagcacttttggaggcagaggcaggaggatcacctgagccctagagttttgaggccagactgagcaacacagcgagaccccatctctaaaaaaaaaaaaatggccacaggtacctgaaagggggactcagggggccacagccaagagagctcaagtctcctcactctgctgccaacacaggtgaccctggttcacccccctctccacctgctcatgtcatggtggtaagtgggtcggggcaggaggcatctcctccccctggctggggtcatgtcttgctccctggtggctgtccctcaggcactcgtggccccctcctcctggtacccccttctcaccatctctcccccaccccttcctttatagcagggagctgcagcagactgcttggagactaggaagaaaggtggccaccgagtctggcatagcagccggggctgtcctctaccttgtctctgaaggcttcagggcctttgatttctgggaaagctcccaccttctttccagatccctctttgcgtggaacttctgcgcaaatgaataagggctacccacttcttggcagaccagccctggctctgtgaagaggctcctggggaaaagagtgtggagtctcttccactaggcaggcagaaccccacgtggcacgtggctgggcaaggccatctgaatggaaactgcagatacagcactgccttagaccatcctgcacgcacccgcgctcaccacacacacacgtcgtgaatataaacatccatatactggtacaggtgtgagtgcttctctggcccctgctctgcatgctaattgtctcttctgcaccttccgggtggatgcgagctctgcccggcagatgcccttgtgcagggtaagggggccaagcagtggggccctggtgaccctaagggggctggaagaaccgtgcccagagcctagccttctttgaactcctctgtgagaatttagtaggcatctgggctttgaaactctgttgagtttccagcactcccgagcagcagcaactgagcccacatagcaagcgtgagcacgcacagagaaacagcacagccacacactcgctcttacccccaccacacagcaagtgtgagcacacacacacagccacacactcgctcttacccccaccacacagcaagtgtgagcacatacagccacactcttacccccacatagcaagtgcgagcacacacagccacacactcgctcttacccccaccacacagcaagtgtgagcacacacagccacacactcactcttacccccaccacacagcaagtgtgagcacatacagccacactcttacccccacacagcaagtgtgagcacaaacagccacactctcgctctaaccccacataggtcagtgcacttcatttgctg[132 bp omitted]aaaacctgtctctactaaaaatacaaaaattagccaggagtgatggcaggctcccgtagtcccagctactcgggaag[137 bp omitted]aagcctcaaccctccgtcattctctcacacacgcatgcacacgcacaaacacatgcatgtgcacacacggatatatatttatatgtacatttgaaacatggatggatgtatccatgcatgtgtgtaccagtgtatcgatgttcatactcaacgtgtgtgtgtttgtggtgagcgtgagtgcgtgcgtgtaccagtgtatggatgtttatactcgccgtgtgtgtgtggcgagcacaagtgtgtgcaggacggtgtaaggcagtgctgcatcagccctcatctgtttccattcatttcactcatcatttcacaaatatcaagggaatggatgaaagaatgaataaacaaagaaaaggccccataagcgaagttaaaagacaagacagagacttgggagaagttattgtgcaatgtgttcaacaagggattaataaccgtcttacataaagagctgctcccaatctacaactccaaaacaccaggcagcaggaaactgggaaaacgatatagaagagtaaacctaaatggccaagcaacttctctggcaattcgcacacattacccttgtcgttgaggaaaatggttattcaacttgttttaaaagacaggaatggagtcaggccaacacccattttaaagctgcatttgttccttagcgtggttctctggttcctgctctgcaccctgattttctcttctacacctttttttcctgctagaaaaccctctcagacaacaccctctgcttccggaccacacgtccctgtgatttctgcttctctttcatgggggagagcttccctctgcccgctctaggcagaggtataaggtgtcccttgggatctgaacaggacatcaggaaatgcctagcctgaggcacctacttactggccaagtgaaggaggcggttatggtctgacacatgtggcttgggttttggcacggggtcccactcttccaagagggtggctggggccttcggctttgacaactggaggatccgcgagctggggactgccatttgggctgccctggatacctgggacacctggaaagagaaatagagagaagggttacgtgaaacagtccatgatgcctcgtgggccctggagctgaaggaccccaggagcaacactgaaagacacaagacagactgggaagaagttggtttgtaatgtattcatgaaaggattagtaactatcacgcataaagagctcctccaaaccaataaccaaaaaaaccccaaaagggctgagcaaagggtacaggagacaaaccctaaatggtcaataaccctgtcttttgaccaatgtaatatcaacaattgttggcaaatgtaaattaaaacaacaaaatatcactccacgctcacaaatttggcaacaatgaaaaagtctgacatgatcaagccctggtgagaggctctcatgcatgactggaaggagagtaaattagtacaggcagctcagggagcaattcgtccactaggttcagctgaacacgcgcaggcttggtgactgccacatacggggactcctgcgcttgacccgaggaagtgggtgcagggatgttccctgcagcttagttaccacacacacaccccggaaggagccgggcgcccggccgctgggggctgcacaagctgactgcagcgcattctcaagagagggcaacccagcaattagaccattttttttctccataaattggcacaaattgctctagaaaacagtaatgagggaaagcaaaacagaagtcatttatggtcacgaacaccacgaaacacgacctaggggacaggatatgaaaacgatggcagtggggcagtgctggccgaggcgggagaccttgcggacgtttcacccagaaacttggcacccttgctccccaaatcaattctcagcagtggccagcacagtggcagccctttggggggtcgaggtggcaggatcatgtgagctcgagaccagcctgggcaacatagcaagaccccatctacacacacattcttggcattttccagaaaacccatagtgcactgaaagtgtgttctttgatgctttgcaccagcctacgcagagactgagtactgcgcggcgctcagacacccttaaactggagctggcttccctcctctcgcctcatacgcattctgttccccttcaccaggcttgctcccgtacacgtgtgtaggagtccgcctgcaaaataactaaggagtaggcaaaggaccgcttcacacgtctcccacttatgctttgctggaagaggaactggccattcctgatgcctctggggagggagggagggagggaaggagggcagctgctgaaatgttttcttccttaaaagggaagtggaggtggccgacccacgcctaactggatgctcctgtccatccattcttggagcgttacctgacagtctgtgattgttggctggtcctaactctagagcctgcgtggaggcagaggatgaaaccatccccaaaggtcactgtgaaatttcagtccctttcttcttgaaattgctcccccataaaaatcacagacacatctctcagcaaagatattgtggtgtttacaatggaagctcccactcagtgatccgtcttctccctccctggctccctccagcctcctctcttcccaccagccctgcggcttccatgcacacagctcaggccgggctgctgaggtagagagactccatttcagtcctgctttcaaggagctccagtcctggaggggcaggccctgattcatccaaaccaactgcagaaagccgttgctcagacaagtgggaaagggaacatggaccgtgcatgttggtatcacggaaccactgttcactttttagtgtgatcagtgttactgggttcgtgttttaaaatgtccttgtctgttagaaattcctactgaagttttatgggagagatgctgtcactttaaacacgtttaactttaaaccccactttaaacaagtggggtctgagaaaccaccataggagaagacgcgaccacacacagtgaggggaatagaagttaatgccacgcgagaaacggccaaaacgtttaggaataatcaggtgaacaaaccaacaagcaagaaagcaggcactaccaccgagtgctgaccacaatggggagagcctgagctcaatccccgcccggagaatgcaagacggcggccaggatgaggcaggcctgagcttccactccccgcccggagaatgcaagatggaggccacgacggggcacaccagagctcactcccctcccagagaatgcaagatggcaaccaggaaggggatcgcctcagttcattccctgcttggagaatgcaagacggtggccaagatggggaagagcctgagctccctctccccacccggagaatgcaagatggtggccaggatgggtttcaggcacatccgtgtgaagaagcctaaacaggctttgtgtgagcaataaaagcttttaatcgcctggtgcaggcgggctgagtccgaaaagagagtcagcaaagggtggtggattatcaattgttcttataggttttgggataggtggtgaagttaagagcaatgttttgcgggcaggggtggatctcgcaaagaaccttcttaagggtgggggacattacaaagtaccttgatcacttagggtggggcaaaaacaaatcacaatagtggaatatcatcagttaaggctatttttacttcttttgtggatcttcagttacttcaggccatctggatgtatacgtgcaagtcacaggggatgcgacggcttggcttgggctcagaggcctgacaacagggacagcctgagctcccacttcccacccaaagaatgcaagatggccaggatacggcgcacctgggctcccactcccggcccagacaatgcaagatggtggccaggatggggagcgcctgagcgcaatccccacacagagaatgcaagacggcggccaggatggggagagcctgagctcaatcccggcccagagaatgcaagacggcgccgtcactttggacaaccattggtcagttttttaaaagttacatatacccagtaactgagaaattccaattctgggtattaccctggagatatggaaacttacgcctccacaaaaagctgtatacagatattcacagttttgttttttttttttgaggcggagtctcgctctgtcgcccaggctggagggcagtggcgcgatctcggctcactgcaagctccgcctcccgggttcaagcgattctcctgcctcagcctccggagtagttgggactacaggcgcccgccaccacccccggctaatttttttttttttttgtatttttagtagagacagggtttcaccatgttagccaggatggtctcgatctgctgacctcgtgatccacccgcctcagccttccaaagtgctgggatgacaggcgtgagccaccgcgcccggcgtattcacatcagttttatcgtaacagtcctaaactggaagccacccaaatacccttcagtgggtgcctggatcggcaaattctggaattgaaccggcgacgacaaggaataaactaccgacgcacgcgagagtctcagatgcagggcggggggcggcagaagccgggtcaagcccgcaggctgcggggttcagactttcggaaaagcaaaaggtacagggcgtagagcgaggtcagtggttgccggtggccaggagtccggcctgagctggggcgagagatgagcgctttctgaacacctgagataagactgttctaattcctgagtgtgagctggaagctttgggatccacccggactgaagcgcagggaaggatgacccctgggcggctctgaagacagtgagagatcaaaagaaagctgctcccagacaaaggcagccgccctgtgcagcttctcctcctcccctgactcccaaacgcaaagcctctttcactctctgccgggtcccagcccgcctggcgggggtgagtcgcggggggcacggggcacccacctcagacatgggcatgctccagaagttatcacgaatcttcggggcggccagttccttcaggcgactcgacgctctgtattccagggaggaccgaggaatgggccagacaggagtcgtcctgggggaggtccccattttagaccagcagctcggccgggggtgggggtgtgtgtgtgtgtgtgtgtgtgtgtgtgtgtgtgtatgtgtctgtctgtctttcccagctcctccatatgtgtctgtctgtctttcccagctcctcctctgtttctggggttaagagagcctgggagagtggtgagttttgaaagcgtctccaaacagggattcgtaaagaatttctaagagttctcaagtacagagctaccatctcccagggttgtctctgctcaatgtgcaacgtccaccctcaggtccaggccttctccattcccttctgggacggcagctcctcccaggccttctctacacacccccatcatcaagagcctggcgtgagcacttggacccaagggatgaaagtgtctgtcctgaggttgcaaagctggggaaagcgaaggacagctgagctcccggggctgtgccttctgaaatcaggtctcagctatgcctctgctcggaaataaagccgcatttcattgattctaaggcaaggtctccacattgaacaggtctgaggttaggatgcagcttacgagtgctgccagccagatggcggaagtgtcctggctacatctggctgcatctgtgtgtgctgttcacgtgatctgcactgctgcttctacaggagttaagtttaattacagtttaaattgtcttcaggtcacagtatgatttggcgttaaaaagtgcacagaggcgtgaggacagtgtgtgcgacacccacatcaacgtctgtgtcagaagtggttcaaaacagttggacacacttccgctgtctacttcagctgtgctttccttcatacgctgcataaaagatgggtaattatatgttgtgtctaaataactaaagatcacttttaacaagcacaggggctgtaagtggtaagaaagaattttgtacataaaatactaatgtgtcttagaatttccaccttttttgagtaaacaaaatacagtcacaatggtgataacatctgagcacgcactgtgtcaggcgctgtgcaaatccccgttcacgggtgccctccaccaccattccacagctggcaatgcagttgcacggggccaagcagcctgctggggatgtggactgggaagcagcctgctggggatgtgggctgggaagcaggccagccccgtctgaacaccagctgtctagggctaggacctggaccctttcccacacagcatcctgtcaggcgagaataaggcatttctgccaaactctgccttctgagtagccacccagccctccttcccccacctgttgttgttgtaatattccaggtagaatctcttgggccgagacagttcctccacgcggcgggacaccgctatgcaaaatgggaaacggagtcagtgaaccccagtgtcaacaccctgcagttcccaggggcttctgcatgcggaattcagcttttcatgagcttgggcaggaggctgaattggaagaactgtgggcagagacaactgggggccagacaccctgcagagagaagatttgctgtccctgatttagggacaatgggctcagaggcttgaaggtcctttctcggacaccggatgggagtggcagggctggaacagcagcccagcaccgtggctcctcaacggggctcaatacagatccagggacccacaggctgggaaaatgggttttgttctgaagttagtacaagcctggggtttccaggggcctagtgatgactgtaggtctaaagtcaagaacagcacaggagagaactggactgttattctcctctatggggaactctcgaagtgtctcatttgaaggtatctatgatacctcaataccaaattcctctcaagaaaagcatggaaatcattgtggaagggaaagcaaagggtctttttgtaaattcttgccccgatttggccctatcctagagagtgttccccatgcccctcacccccaggaccagtctcagctctagctcctcaggggacagactccagtggggaggacagaggctccgaggagatggggcaagggaggccagaagtatctagatggggcggggcaggttccctggaggccggcagccgggggcaggggtctcagcaggcacgggctccacctaccgggcactgtgatggtgagggtggtgtcctcaaggaaccgctcggtccagtacacagagggcctggaataagcggacggctcagggcaagggaggcagagagccctggccctgcccggaaacaagcctgggtctctgccaggagggtggccgaggtggggtgtggagttgctgggagagggggtaggccagagaaggacagtgggggggccggcgggacgcgtggattattgtgagcaaggctgatgtccagagaaggaggtagctgggggagaagcatagctaagaagagggcccagggccacctcctgggagcagacccaggtcacaagggtggagagccccacatctgaggagccctccctgatcctcctccctggagagaggagggtggctggagtgaaggggtcccctggaacctgacacgtgtcccccagcataggcacacggcggagacagccctggacttaccagcagagacagaagtgcaagctcatcttacatggggagatccaggcataccccttaccacagcgtcccttcctgcgaggagacagggtccgagccccactgcctcttgccctgggtctcccgtttgctcccaaactcctcactctcctttggccaccgcccagagggccaccgttccctagccactcccagtgtctggccacctccttaactggccaaccccacctaccctaagtttgctggatgtggtggcagctgggggaggggagccgagcagtggggacaggaggagcccgggaagggtgcagagaaagccgcccacgctgcccctacgaggccgtggtctggcgtgtcctcacctgtctttcaggacttgccagtttatcttgggctctgccagctccatgagcctcctccgcctcctcctcttccttgctttggtcatggtggtgctggggagcttctggctgatggacagccggctttgggagaattccacgttgaagttggagctgctttcccgccccgatgcgtttgggagcccagagaagcgtgggtcttgctcaagcgccttttgtctgcactcaccctgcccacccgcctctcctttccctcgaggggtctctgagggaggactttggcaccacgaaggcctggaccaaccgcagctccactgctcgctggatggaagacccgtccaggtcacctgtctcccctggtcctcagcttcctcctctgtgaattggaggtgagaccagctcccacctggcggggctgttttggtgagtactaaggtagtgtttactcatctcacagacatctgtcaagtgcttactgtatgccaggccccagaggggcaaccaccctctaaagagagcggctcctgcctcccagaaagctcacagactgtgggagggaaacaggcagcaggtgaagatgccaaatgccaggatatctgccctgtccttgcttgatgcagctgctggctcccacgttctccccagaatcccctcacactcctgctgttttctctgcaggttggcagagccccatgagggcagggcagccactttgttcttgggcggcaaacctccctgggcggcacggaaaccacggtgagaagggggcaggtcgggcacgtgcagggaccacgctgcagggaggacgggagccgagtcccagaggtatgtagagtgcgcgccttgctggggacactccagcaactgcccaaaatcagcgcccccagtgctgattggccgaagcgtcagttcacccagaacgtgttcctcccgaccatttaaaaccttttagccacgtgtggtgcttagaatggtttcaacttttgagttgggaggctttttttttcccatttcttattctctctgtctgacttgaggccatcactcgctaaactctgaactctgggcacctgaactcagtctgcctgactccaaactcagcgctgtttactcctcctcctgccaccagataggggagcgtctgctggtgtctgcctcagggcccagtgaggggtgctggccgccaaccgaccaagcccacacctaggctgactcggcagggccgggcccctcgggagcagcgagccaggccggtggccggttacgaccctttcgcccgcccagggggctgctgccctccccccactgccaggggctgagccctaccccaccgcacccaggcaggcccgttccccggtgcccacctgatttcaggaatgtcctcttccaagtccttgtccaggactctctccaactcagaaagtgcctctttgggatccagggtctccgggaactcctccccggccacctcctcggggggaagctcctcttctgggtcttctggtcccagctctgcattgtccaggtcctggcgttcggggtctgtgacccgccggctctcgtacacagagctctggaggccacgggggtcgccgtcctgctccctttccgacctgcccgcagcctcagagctgggctggttcccgagtgaccttcgcctgctgtcccccatacaccggtcccttcccagcccccgcggcctcactctcccggcacccaaatgtgtctgtggtggccgcggcaacaggagagcgtccgtcacattccccacggtccacattctaacccgtgcgccgtctccaatgctggtcacctgggcttgcgctgggatcaggactcagtcctggtggtcacggctcactcaggacctcccaggattggtttaggaaggagacctgacgggaacctgcaggggcatctagctatggattccctctctcaaaaggagacacaaggaagagaccgcgtctcctgttcctgtccctgtggggcccgtcggtaatgtccagagcccaggcagccttcttgtgaccatgaggcctgccatctgagggcagatgaactgaaaggtgggcctttgatgtggctgtcgagcctctgaacttagcagccttggaatccactctgtgtccaggcttcttgttacttgaaacagtaagtttccttagtactaagtcgttttggcttggtttccaattcctagcagctaaaactgcaccctaggtgatacagacgcttccagccccaacctctcatgagaaataacttcaaaataggctgttccaaccctcacaacaaaataatggttataactggagtattccccaggctgctgccttcaggaattcctcgtacgtcgccaaaggagctgaatttccagcctctccccctctgtgccccacccagcctctccccctgtgtgccccacccagcctctccccctctgtgccccacccagcctctccccctctgtgcccccacccagcctctccccctccgtgccccacccagcctctccccctccgtgccccacccagcctctccccccccgtgcctccacccagcctctccccctctgtgcccccacccagcctctccccctctgtgccccacccagcctctccccctctgtgccccacccagcctctcccccgtgtgccccacccagcctctcccccctgtgccccacccagcctctccccctctgtgcccccacccagcctctccccctctgtgccccacccagcctctccccctctgtgccccacccagcctctcccccctgtgccccacccagcctctcccccctgtgccccacccagcctctccccctctgtgcccccacccagcctctccccctctgtgccccacccagcctctccccctctgtgccccacccagcctctcccccctgtgccccacccagcctctccccctctgtgccccacccagcctctccccctctgtgccccacccagcctctcccccccctgtgccccacccagcctctccccctctgtgcccccacccagcctctcccccctgtgccccacccagcctctccccctctgtgccccacccagcctctccccctctgtgccccacccagcctctcccccctgtgccccacccagcctctccccctctgtgccccacccagcctctccccctctgtgcccccacccagcctctccccctctgtgcccccacccagcctctccccctctgtgccccacccagcctctccccctctgtgccccacccagcctctccccctctgtgccccacccagcctctccccctctgtgccccacccagcctctccccctctgtgctgtgtgcccccacccagcctttcacccttctgtgcttggtggttttctactcatcattgaagactcaagcctgtcggtcccccacgcagggagagtccctgaccatccctcccctttctgggctcccaggcctaggacccccacccctacccccacccagtgctagcccaccccgaggactgctctgtccctcacccctgccaccagcgtggggccggccctccgggcatggtgaccactcggcacgcaagagacccagttcatcgacacacacaaagccctctccagctcccatcccatctccctgatgctctgctcccagacgcagcctcaccaccacctctgtcaggaaaggggtctctcggaggactccaggcagaagggccccggggaggatccggtcccatcaaggaggccatgggaaaatcccctttcttggccggaagtctcgtaaacccttaccttgcactcaatgatttacttttctctcttaagttaaactggatcaagatctgcgggtgcctttcacaaagagatgagttaggcattgttgccgctggagggcctgtggccactgcagtgtttccaggagacctcgttcagagcagggcgccgcaccccgaggctgctccctaaccctactccagggaggcgcggttgggggtctggcagcctccggctctcagcacccaggcagcacccaggctgcagcgcgtttagccctcatggcagcccgttgtggagaggagaggcagatgagcgctccagggtcatggggaagctcccagggccacgcggctggtggagctgcacccggcaccttctcgggggagtcagggctggatgtctctacggcaggagccggaggagctcaggagcgcgcggggacagcagaactctgcccgcactcgggggagagttggagggtccacgtctgctccaacatcctgtggaaaagcaagacgttcacagccaaggaagtgcatgatttctgaatgttgtgtgatgttgctttgagcagaaaatagagggggacggggaccgggctgtgggatgtgtggggttctgactgcccggacctggggcgtccgcctggcagaaaataaaccaggtccctactgtgttcctctctgctgtggccgccttaacacatatcacaagcagaggctccagcaacactgagcgattacctggccgccctgggctcagaagcccaacatggatctcactggactcaagccacggtgtgggcagggctggttcctgcagccttcagaggaaggcccgtctcctgctcatttggtggccacagaattcagtgccttgtggtcgtaggactgagatctgcgttcttgctgtgtgtgtcagccgggggcccttcccagcgttgctgtgtgtgtcagctgggggccccccagcacccagaggccaccgctcttctcagtcctggcccctcgctccattttcaaagccagcaacggccagtcaagccccctcacatggatgctccactggcactcatctctgagcagggctgggaaacccgtttggttattacggaaacaggtgattgaaggtcagcctggataagccaggtgctctgaccctccacgtctgcaaccccagtcccacctgcgaagtccattttgccacataaaataacatgctcccagtgtcaaactcaaacgagcacatagagaggcatttttacgtaagacattttgtttgggaaaatacataaaaacagaattgagacctggcgcggtggctcatgcctgtcatcccagcactttgggaggct[133 bp omitted]gaggcaggagaatggtgtgaatctgggaggtggaggttgcagtgagccgagatcacgccactctgcaccccagcctgggcgacagggcgagactccgtctcaaaacaaaaaacaaacaaaaaaaaaccaaaaaaaacagaattgcaatttcgggcctgtacacagaccgggaggtcttcggtatatctgcagcaggttggggcttttactagaaggaacaatgttgcgaatcatttcgaaagaaagctcgcaagaactggaagctttgggagctggtgagctgtgactgggagggaggtgggggcagaagggacctggtgagctgtgactgggagggaggtggcggcagaaggcgtcttcatttagctgaggtcacctccacagctcccaggtcaaattggctttagggtcacggcaggcggtttcgggcgctggcctgtgacgccgtcctgggcaggcgcgtgcatctgaatgctttttacctggtctctcgactgttgcgttgggtaactcccatccatatcaccagtttcacaccaggttccagggacgaggatgtggacaccgttggggatcactattccttctgtgacacctacctcataccacacacaacagccctcagtggatacgtgaaagctgaaacacaacttcaaaacttacagaaaaaaatgaatgtgaccatgcttttgcgctccatgtagggagtaatttttttaacaagacatgtagagtgctaatcatacacgaccaataagtcggccatattaaactgaagcctcatgttcaggactcctcaaaaaagtggaaacagaagccacgaatgggaatgcagcatctgtcacatctataattgattagtacccaccatgaataaata[133 bp omitted]ggtgaaccccgtctctactaaaaatacaaaaacttagctgggcgtggtggcgggcgtctgtaatctcagctacttaggaggctgaggcaggagaatgacttgaacccaggaggcggagtttgcagtgagccaagatcctgccactgcactgcggcctgggttacagagtgagactcctctcaaaaaaaaaaaaaaagagcagaaccctggtgatgagcagatgtaggacgtggggcagaaccgtggtgattgatgagcagatgtaggaggtggagcagaaccgtggtgattgataagcagatgtaggaggtggagcagaaccgtggtgatgagcagatgtagggggtggggcagaaccgtggtgatgagcagatgtaggaggtggagcagaatcgtggtgattgataagcagatgtaggaggtggagcagaaccgtggtgatgagcagatgtaggaggtggagcagaatcgtggtgattgataagcagatgtaggaggtggagcagaaccgtggtgatgagcagatgtaggaggtggagcagaaccgtggtgattgataagcagatgtaggaggtggagcagaaccgtggtgatgagcagatgtaggaggtggagcagaaccgtggtgattgatgagcagatgtaggaggtggagcagaaccgtggtgattgatgagcagatgtaggaggtggagcagaaccgtggtgattgatgagcagatgtaggaggtggggcagaaccgtggtgatgagcagatgtaggaggtggagcagaaccgtggtgattgatgagcagatgtaggaggtggagcagaaccgtggtgattgatgagcagatgtaggaggtggagcagaaccatggtgattgatgagcagatgtaggaggtggagcagaaccgtggtgatgagcagatgtaggaggtggagcagaaccgtggtgatgagcagatgtaggaggtggggcagaaccgtggtgatgagctgatgtaggatgtggagcagaaccgtggtgatgagcagatgtaggaggtggagcagaaccgtggtgattgatgagcagatgtaggaggtggagcagaaccgtggtgattgatgagcagatgtaggaggtggagcagaaccgtggtgattgataagcagatgtaggaggtggagcagaaccgtggtgatgagcagatgtagggggtggggcagaaccgtggtgatgagcagatgtaggaggtggagcagaatcgtggtgattgataagcagatgtaagaggtggagcagaaccgtggtgatgagcagatgtaggaggtggagcagaatcgtggtgattgataagcagatgtaggaggtggagcagaaccgtggtgatgagcagatgtaggaggtggggcagaaccgtggtgatgagcagatgtaggaggtggagcagaaccgtggtgatgagcagatgtaggaggtggggcagaaccgtggtgatgagctgatgtaggaggtggagcagaaccgtggtgattgatgagcagatgtaggtggtggggcagaaccgtggtgatgagcagatgtaggacgtggggcagaactgtggtgattgatgagcagatgtaggaggtggagcagaaccgtggtgatgagcagatgtagggggtggggcagaaccgtggtgatgagcagatgtagggggtggagcagaaccgtggtgatgagcagatgtaggaggtggagcagaaccgtggtgatgagcagatgtaggaggtggagcagaatcgtggtgatgagcagatgtaggaggtggagcagaaccgtggtgattgatgagcagatgtaggaggtggagcagaaccgtggtgatgagcagatgtaggaggtggagcagaaccgtggtgatgagcagatgtaggaggtggagcagaaccgtggtgatgagcagatgtaggaggtggagcagaatcgtggtgatgagcagatgtaggaggtggagcagaaccgtggtgattgatgagcagatgtaggaggtggagcagaaccgtggtgatgagcagatgtaggaggtggagcagaaccgtggtgatgagcagatgtaggaggtggggcagaaccgtggtgatgagctgatgtaggaggtggagcagaaccgtggtgattcataagcagatgtattaggtgttgctgttgctggggctgtggcaggaagtggttgatcacattcctattctccagttgggtaatgagctcatggttgaatcgtgaatgggtaaatgaatgggtggatggaaataattatggttcacctaattttatgcccctaaggtccttgcaaaagaaaacggagggaggagagagaggagaaaggggaagaagtcgcattcaaattcactctcgccagtctctaaaatggcagattcgttttgaaacaactccagattaagcctacagagggaaggcatggctgattctgctgagcacctattacagcttcagcagcatacctcgtttcggtccacaacagctgtgtaagattgtgacggagctggaaagttcctgttgcctagtgaggtcatgtcctagcgcagaacgcagaatcacgaagagtgacgaatgcccgccgtcaactgctggccgggctgcgtgtcatgcagcaacgcacaacggaagcacacccttctcctgttcccagtggtcagagccacccaagtcgggggtgtgggcccccagcacttctacttcaggatggagaccccctgctgcctggctccctccccaggcccgccaggctagtcccctcccctgtccctctctcaggcctgctctcatagccacgcgggcctttctgctgcacacgccagctcagttcggggctcagtaaccccctcccaattcaggggcatgactccttccagattctccttaaatatcacctcctccaaaaagccttccccaatcacctcgtctaaagtagggccccctcatttttctacctaaatctatggggagtttgtttgcttagttgcatgtatcatgatcttgctttgtgttgactttttacatatttattgtctttttatctcattagcatatgtgctccaatagggtggagactgtgatttatcttgttcatgcctggacttccagcagcattcagaacagaacttctttctttctttctttcttttgagatggagtttcgctcgtgttgcccaggctggagtgcagtggtgcgacctcggctcgccgcaacctccgcctcttgggttcaagcatttctcctacttcagcctccggagtagctgggattacaggcgcgcgccaccacgcctggctaattgtatttttagtagagttggggtttctccgtgttggtcaggctggtctcgaactcccgtcctcaagtgatccgcccgcctcggcctcccaaagtgcagaagagaattccaggaagcctcgagagtgagtgacggcccgcggcccccggcgaggaggcagcaataccacaggcgaccaccagctgccgccgcagtcaagggcagttggtctcccctcgccaggattaaccctggaccgagggctcccgaaccgaatcgtccccacagcctgtcctgcgagggcggctttccccattaccaccctcgtttcaccaaggagaaaacgagctcagagaggcagtgcattggcccgggattgcaccgggcgcgaacccacgtcagctcccgcagaacctagatcattcgctgccacctccctccgggcctgctctcgcagtgttgggtgggaacagaacagccttggtcgtggctgaggagaaatcccacagatgtcactggacgagggtgacgggtggggccgggctttcccctgggtacaggcacaaccgtgctcttccctcgcacagtgacccgcggtgtcatccacaattcacagcctgtttcccagaggaggggctcggagcggtgccctccaggtgccgccagcaacacaaggcccagactacagaacaccaaatactgtgatgagaaattacttcccttttccttcagggccagtcctggctaccccaaggggaaagtcgcagcttggtgcaaatgaaagttcaactgtccccagcattgtcaatggtttttacagagagagagcaggcccaagcctggggcagagcataggagctggttagtaaccttgttttgttctcactgctgtttgtttgcatgcctttctggctttgtttgtgttgttgttttgaaataattgcgaactttcaagaaaagtagtatcattttgaaagaaagctccctggaactgatgaagtgggagggaggtgggggcagaaggcgcctggtgagctgtgactgagagggaggtgggggcagaaggcgcctggtgagctgtgaccgggagggaggtgggggcagaaggcgcctggtgagctgtgactgggagggaggtgggggcagaaggcgcctggtgagctgtgactgggagggaggtgggggcagaaggtttctttgtgtcactgaggtcacgtcggcaaacatagttatcgttatcctcctatttgcctagggaaagcaccaggatgtttaatgcctacagtccaaaattggttggtggaagtacctactgtcagtcccatcagtagattcacttatcacatggtaagcgggatgtcactcaggccacgggtaaattatttacaagacttttcttatcaaagatcattaaaatttagacctatagggaaaccttgccccaaggaaattcccaaaggatcaaaaaatacagaagttttagtttggaaagaatgtgtggccaatagtgcggtgatattacaaaacaatgaattcggaactattatagattgggcacctcgagtcaattctaccacagttgctcaggacaaactcggtcgtgtccaagtgcacaagtgagtccagctgttgatagcgacttaacagaaactctagacaaacataagcataaaaaattacagtctttctacccttgggtatggggagaaaaaggaatctctaccccaagaccaaaaataataagtcctgtttctggtcctgaacatccagaattatggaggcttactgtggcctcacaccacattagaatttggtctggaaatcaaactttagaaacaagagattgtaagccattttatactatccacctaaattccagtccaacggttcctttacaaagttgcgtaaagcccccccttatatgctagttgtaggaaatatagttattaaaccagactctcaaactataacctgtgaaaactgcagattgtttacttgcattgatttgacttttaattggcaacaccgtattctgctggggagggcaagagagggcgtgtgggtccccgtgtccacggactgaccgcaggaggccttgccatccgtccgtattttgactgaagtattaaaaggcgttttaaatagatccaaaagattcatttttactttaattgcagtgattatgggattaattgcagtcacagctacggctgctgtagcaggagttgcattgcactcttctgttcagtcggtaaacttttaatgattggcaaaaaaattctacaagattatggaattcacaatctagtattgatcaaaaattggcaaatcaaataatgatcttagacaacctgtcatttggatgggagacaggctcatgagcttagaacattatttccagttacagtgtgactggaatacgtcagacttttgtattacaccccaaatttataatgagtctgagcatcactaggacatagttagacgccatctacagggaagagaagataatctcactttagacatttccaaattgaaagaacaaattttcgaagcatcaaaagcccatttaaatttggtgccaggaatggaggcaatcgcaggagtggctgatggcctcgcaaatcttaaccctgtcgcttgggttacgaccatcggaagttctatgattataaatctcatattaatccttgtgtgcctgttttgtctgttgttagtctgcaggtgtacccaacagctccgaagagacagcgaccatcgagaacgggccatgatgacgatggcggttttgtcgaaaagaaaagggggaaatgtggggaaaagcaagagagatcagattgttactgtgtctgtgtagaaagaagtagacatgggagactccattttgttctgtactaagaaaaattcttctgccttgagattcggtgaccccacccccaaccccgtgctctctgaaacatgtgctgtgtccactcagggttgaatggattaagggcggtgcgagacgtgctttgttaaacagatgcttgaaggcagcatgctcgttaagagtcatcaccactccctaacctcaagtacccagggacacaaacactgcggaaggccgcagggtcctctgcctaggaaagccaggtattgtccaaggtttctccccatgtgacagtctgaaatatggcctcgtgggaacggaaagacctgaccgtcccccagcccgacacccgtaaagggtctgtgctgaggaggattagtaaaaggaaggaatgcctcttgcagttgagacaagaggaaggcatctgtctcctgcccctccctgggcaatggaatgtctcggtataaaacccgattgtacgttccatctactgagatagggaaaaaccgccttagggctggaggtgggacctgcgggcagcaatactgctttgtaaagcattgagatgtttatgtggatgcatatctaaaagcacagcacttaatcctttaccttgtctatgatgcaaagacctttgttcacgtgtttgtctgctgaccctctccccactattgtcttgtgaccctgacacatccccctcttcaagaaacacgcacgaatgatcaataaatactaagggaactcagaggctggcgggatcctccatatgctgaacgctggttccccgggtccccttatttctttctctatactttgtctctgtgtctttttcttttccaagtctcttgttccacctaacgagaaacacccacaggtatggaggggcaacccaccccttcacaggtcaaattggctttaaggtcccagtaagaactctgtgtgtccttcacctggtcacccgctgtgaacgacctgccgccctgtgttatcctcctgtcggttttttcctgaacatttgaagctaagttgtagatgtcatgcacctccacccctaaaaatttcagtatttatgtatttctttatttttgaggcagtgccttgctctgtcatccaggctggagtgcaacagtgaatctccacacactgctgcctcaacttcctgaggtcaagcgatccccccaacgcagactcccgagtagctgggaccacaggggctctgagtctcagcgtcggccgtgtgtcctcgagtacacatcagggtctcagcctcggccacgtgtgtctgtgagtacacagcagggtctcagcctcggccacgtgtgtctgtaagtacacggcagggtctcagcctcggccgcgtgtgtctgtgagtacacggcagggtctcagcctcggccgcgtgtgtctgtgagtacactgcagggtctcagcctcggccgcgtgtgtctgtgagtacacggcagggtctcagcctcggccgcgtgtgtctgtgagtacactgcagggtctcagcctcggccgcgtgtgtctgtgagtacacggcagggtctcagcctcggccgcgtgtgtctgtgagtacacggcagggtctcagcctcggccgtgtgtcctcgagtacacatcagggtctcagcctcggccttgatcatctatccttgttatataataagctcacataaattagtaacaggtcaaaaccccggcaggaggatgagtgagaacttggatgagcaagttacaaatggaagaaatacggtggccaagatcttaggaaca[213 bp omitted]gagggagaagaatcacttgaacccgggaggtggaggttgcattgagctgagagagacagagagacgtgcagggttgacaaggatgggctggcgtgggggcaggccccacaccctcagccctgcacgggcgcagccctcagaagggaactgggcggcaggtacctgcatcacagatgctccgtccttgggcccaggatcttcacccccagtcatctgtcttgtggagtgtgtcgctatgaagaggtccctgaggctgggtcgttcataacgaagagggttcatttgctcacggttctgcgggccgtacaggaaatgtgacaccggcctctgggccgcttctggggaggccggggaggtttacccatcaaggaaggtgaagagggagctggtgtgtcacgggtgagagggagcaagagggaaggtgccgcactcctaaatggctctcaggtgagcaacaggcaggacgggggacggtgccgcactcctaaatggctctcaggtgagcaacaggcaggacgggggatggtgccgcactcctaaacagctctcaggtgagcgagagttagcaagggggaaggtgccgcaatcgtaaacagctctcaggtgagcaagaactcaactcacgtgtcaccaagggcatgggctaagccctgcaggcgggatctaccccgtgagccagcacctcccaccaggcctcacaccaactctgggcgtcacatttccgcatgagatttggagggacacatgtgtccaaacatgtcacagagcacgtagtcagtgacgttcacacatgaatattcatcccagatttactcatggtaatgaaaccctcaacacgacagcagagtttgggtgtgttcctaagagcgggtggtttgcagatgttcacctcatccaaaaacatcctcacagacctgcccagaatgatgtttgaccaaacttctggggatcctgcggcccagtcgagttcacacaaaaaattcaccaacacactcggcattccggggaagctggggacgcgtgaggggccaccaggtggctgcagagacagtgtctgagctgtgaggtctattttcagcccaaagagtcggcttctggggaacagcccaagatgcccttggaggagaggctgggacgagtcccccagtccctctgcagccccaacccccaacccagcccttgacaagcccctcccctccagacacagggcaatgcccctctccgtctctctgtctctctctctctcccctccctctttctctgtcctccgtgtgtctgcctgtcctctgagtccaccactggcctcttgcacgtgccctgcccgtggctcctgccctcacgtctctgctcgctcccgtatcccccatgagctggttctgggaggccgcggtctggcttgtggggacccatccatttctctcctggggcctgagctggggttggggttctagagcagcgcaggccaagaccccacggtaatgggagacagaggtgggtagagcgtggcctccaagacatgattctgaacaatgcagacccatggctgtaacagatgcagcccatgtagcctgagagtagggtcactgtacaactacagatgccatcaacaaaactccgtgtagcaacatcctcccactcagtcctcgagcagccctgaaggcacagccaccattgctccctgtcacagatgggaacaccaagacagccaccattgctccctgtcacagatgggaacactgaggcgagtcctcgagcagccctgaaggtgcagccaccattgctccctgtcacagatgggaacgcggaggtgcagggacatcggtggctccccagggcccggctgtgagcagctctgatgtggcagccccttctccccagcattggggtgcggtcaagcccgcggactgggcaaccgggctctgcttcctccgcgcttgccaagagcctcagaaggaggccgttcctcatctgtgcacacgagggctggacacagacacacagcacactgcgcccacgccatggccagcctgaggcagacatcagcagccgaatgctgagggccacactgtttccctctgagccctggcaaggcctcagaacccttctcaacccttagccaaggccaagtggtctgagaggcccaggagcttcactctgtggtcctcagggtgccattaacccgaccccagggccagcggcacctccaggcctggccccccggcccccgccccggcccccgccctggctggctcccagcccacgctgctccactgcaggcccggccagcagcatctgttgccatggtacctgctggggtagcaaggcccccccacccacagtgggacatcaccacagcagccggtgagatttaaatgcaggcagcggattagatctgagcgttgtgtggatgtggaatttcccgatgttgacaacagccccagggttataaaagagaatcctggtttttagaaaagatacgctgatatgtttaggaggaagtgggcattgcacctccagcatagtcttcaatggttctgaaaatgtgtataaatatgaatattgtaccatatgtagataacaggtggctgtagatacagatagaggtacagacaccgaagatgacacagcaaatggggaaaatccagcccgctggtgactctgggtagagtcagggggagttcctgctgtatgacaagtaatcttgccactttcctgtaaggtcaaaatgatatcaaaactaaaagatgtgaaaacaatattcaaagcatagagtcttgggccagccccccaccttacctcctacagagaccccaactctgcaggtctagatgagctcagactttgatttaatcagcatcaaggagagtatgatgggttgagttgtgtctccccccaaaacacggtccatccctggaacccatgagtaggaccttatttggaaataaggtctttgcagatgtgatgagttcagatgaggtcaccctggagtccggaggaccctcaatctgatgaccggcgtctctctaagatgaggagtgggctcacaacactctcaggggcaacggccgtgcaaggacagaggcagagactggactgaggcatctacaggccgagggccaccggccaccaccaccagctggagaaggacacagacgcagtctccctctgagcctctggaagaagccagccctgccgacacctggatggcaaagctctggcctccagaaccgggaggacacatctctgctgtgggaacacccaggccatgtgcctttgctacggcagccccaggtggcagctgctcagtccgcgaggaggggcagcactggccacgtccaaaagcttccggaagagcgggcagggtcctgcacagctgttcattcacccgcgagtacgtcaagcatacattgggcaccgactgtgtgccacgcccgtcccggcagaggccctggggacccagctgtgaacaaaatcggcaaaatccctgccctcctggaggtggcgtcttagtggggaagacaggcaagaaacacgattggtgaattgccgggagaacgcggcagggaggagatggtagagtcgtggggaaggcaggaaggtagggaggtcggagaggccttcccaggaaggggactttggacaaagacagaagtgaaggaggtgaggaagggactgggaggtgatcaggggagagtgcaccaggaggaaaagcctggaggtgggatggggccagagcctgcagggacagcggggagataccaatacacaatggggtgagtggggctggggaggagggcatcggcgtggtccccattccgtggggcccgtggctctacaggaacagccgtccctgagtttggatagacgtctatgcagccctgtgccaggcaggcacctccctctctgcagcagctctctctgggcctgcaggctcctcagaacacgcatgcctcgaaggtcttccctggccttaggggtggagtgtgtgagggtctccacgtgagggaccacgtgggcaggcagtgccggcagccctgccccatgtgctggtgtaatctgaggtttgctctcccgtcgcccaccctcattattgtgcaattaaacacttgaggcagaggatgacgaggttaaaaatagcccttcctttcagccagagagagcccgtgagtgtgagtgggtgtgaggagggcctgggggccgtggaggtggtgtctgcagctgcctgtgaaggtgggaagaggccccaggcccccatcctgttgatttctcagaaaaacatctgagcaccttggccatcacacacatttattccgctaaaacttgaacacttgctgtgtgtcaagcacggttctgggcctgggaagaggctgggaggtggtcctggcccccacagagtgctgagaagaaagcaaaggagagttgggggaggatggaggcagggaaggccactgaggtgaaggccgtgagggtgtctaggaagagcacagcatgagcaaagactctgagaccaacgtgcctgctgtgcagatggaaccaaaagcaggcccatgtggctgcagcagactgagtaagggagagaaagggaggaggtgagagcaaggaggtggccaggcaggtcattcagggcctggtgggaatgggaaggagttgggtttttaccgtgacagagatgggagagacggaggtcagtgtacagagtcagcaggtggcaggcctggtgctcacagtccagagaccagggatgaggcaacagagctggtctagggacaaacaatggaacagatgataaggaaggatggtgggggtgtgtgatgatggggaaggatgacggtgaaggatgataggaaaggatggtgggaaaggatgatggagaaggatggtggggataggtggtgatggggaaggatgatggagaaggatgatgggaaggatgatggagaaggatggtgggaaggatgatggggaaggatgatgggaaggttgatgggaaggatgatgggaaggatgatgggaaggatgatgggaaggatgatggagaaggatgatgggaaggatggtggggataggtggtgatggggaaggatgatggagaaggatgatgggaaggatgatggagaaggatgatgggaaggatgatggagaaggatgatgggaaggatgatggagaaggatgatgggaaggatgatggagaaggatgatggagaaggatggtggggataggtggtgatggggaaggatgatggggaaggatgatggagaaggatgatgggaaggatgatggagaaggatgatgggaaggttcatgggaaggatgatgggaaggatgatgggaaggatgacgggaaggatgatggggaaggatgatggggaaggatgatggggaaggatgatgggaaggttcatgggaaggatgatgggaaggatgatgggaaggatgacgggaaggatgatggggaaggatgatggggaaggatgatgggaaggatgatgggaaggatgatgggaagggtgatggagaagggtgatgggaaggatgatggggaaggttgatgggaaggatgatgggaaggatgatggggaaggatgatgggaaggtgatggagaaggatgatgggaaaggtgatggtgaaagatgacaggatgggtgatgggaaggatgataatgagaaggataatgagaaggacaatggggaaagatgatggggaaggatgactggaaagacaatgggagagatggggaaggaggatgggaagaatgacagggaaggatgatgggaggatgactggagaggatttaacagaagagaggatggagaaggaagatgggaaggatgatggggaaggatgatggagaaggatgatggggaaggatgatgggaaggatgatggagaaggatgaagggaaggatgatggagaaggatgatggggaaagatgatgggaaggatgatgaggaaagatgatgggaaggatgatggggaaagatgatgggaaggatgatggggaaagatgatgggaaggatgatggagaaggatgggaaggatgatggagaaggatgatggggaaagatgatgggaaggatgatggggaaagatgatgggaaggatgatggggaaagatgatgggaaggatgatggagaaggatgggaaggatgatggagaaggatgatggggaaagatgatgggaaggatgatggggaaagatgatgggaaggatgatggggaaggatgattgagaaggatgatgggaaggatgggaaggatgatggagaaggatgacggagaaggatgatggggaaagataatgggaaggatgatggggaaagatgatgggaaggatgatggggaaggatgatggagaaggatgatgggagggatgatggagaaggatgatgggaaggatgatgggaaggatgatggggaaagatgatgggaaggatgatggggaaagatgatgggaaggatgatggagaaggatgatggggaaggttgatgggaaggatgatgggaaggataatgggaaagatgatggggaaggatgatggggaaggatgatgggaaggatgatggagaaggatgatggggaaggttgatgggaaggatgatgggaaggataatgggaaagatgatggggaaggatgatggggaaggatgatgggaaggatgatggagaaggatgatggggaaggttgatgggaaggatgatgggaaggataatgggaaagatgatggggaaggatgatggggaaggatgatgggaaggatgatgggaaggatgatggggaaggatgatggaggatgatggagaagggtgatggggaaggatgatgggaagaattatggagaaggacgatgggaaggatgatgggaaggatgatggggaaggatgatgggaaggatgatggggaaggttgatgggaaggttgatgggaaggatgatgggaaggatgatgggaaggataatggaggatgatggagaagggtgatggagaaggacgatgggaaggatgaatggagaaggacgatgggaaggatgaatagagaaggacgatgggaaggatgaatggagaaggatgatgggaaggatgaatggagaaggatgatgtgaaggatgaatggagaaggacgacaggaaggatgaatggagaaggacgatgggaaggatgatgggaaggacaatgggaaggatgatgggaaggatgaatggagaagtatgatgggaaggatgaatggagaaggacgatgggaaggatgaatggagaaggttgatgggaaggacgacgggaaggatgaatggaatgggtgattgggcaccaagtgagagcattcggtgacacctttttttttttttttgagactcccttttttttttttttttgagacggagtctcgctctgtcgcccagtctggagtgcagtggtgtgatctcggctcactgcaagctctgcctcccaggttcatgccattctcctgcctcagcttcccacgtagctgggattacaggcgcccgccaccacgcctggcaaattttttgtaattttagtagagagggggtttcaccgtgttagcca[134 bp omitted]ttcgcaatgttgtgcaactataact[224 bp omitted]tgaggcaggagaatggtgtgaacccgggagcggagcttgcagtgagccaagatcgtgccactgcactccagcctgggggacagagcgagactccgtctcaataaataaataaataaataaataaatagtcagtgtcttgctttttggcccaggctggagtacagtggcatattcacagctcactgcagcctccaattcctgggctcaagggatcctcctgcctcagcctctcacgttgctaggattgtaggtacaagccaccatgtgtagctccccaaaccattcttcttatctcagaaagaaatcctctggatttagctatatttgacatttcatgtaaatataagcagacaatatgcgtccttttggcctgagttttttcactgagtgtcatgtttcaaggccgtgctccattttttttgtgattgactactattccagcctacgaatatgccgcacggtggttcatctctctctgccgatggacatttgggctgtttctacgtttcgaatgatgtaaacgagctgtgtgtcttcttcaataaatgcccattgaagtcttttgcctattttttaatggggttgttggtcattttgttgctgagttgtatgcatagtttatgtgttctggatacttgatcctgatgagctcagtgaacatttataaacaaactgaccatagcagcccccactccaatgaaaacgccacctgtgacggcccccagaggcccctcgtccctcctggtccctgccccgggggccccatcctgacttccattgctggcagcgggtaggttcatgtcggctgctcttgaattcctcctgcctgggctgccccgcgtgatccactgagtgtggcagagacgtgtcgtgctgctgccttcagcagctccacctgcttgctgagaaggttcccggtgcgtttggaaggcagaggctcctgggcttgcaggtaggtgaacgcgctgacagagaggactcggccggcgcaccccctcacccccgtccaccatcctgaacacctagtcctcacacatcctggaagatttgcagcctcagtctcttccaaatgtgtcttactcctctctgctcaccctggtgccaggcatccgcctttgcccatccagacccagcaccagtgccctgccctccccttggcttctgtgctgcccggccatgccccttccttccagacagttcaggtcatcctaaaacgttcatccaagccctttgcccacaggataaagtccacactcctcttacagtcctgtgacccacaggcctccttggaattttggggctgagtcctttctgctctggggcttcacaacccttttgtcctctggcctcctcttccaggaagtcctccaagggcaagccttgcaggactcagactaggcacccaccccaatgcttgtcgatgagaaagcctcagtcaggaaggaactcgggcagaccagggatggtgcccctgctccatgacatctgggagtctgctctaagaccaggaggctggggcccacctgggctgccagctgcacctgcctccctgggccacctccttttcatggcctgggtttggaagctacccactgccactttgtattgcgcggagcagtctggaggggacaggcccagtggccactgctccatggggtgagtctcagctctggagagcgcagggccgggaacatcatgtcagggacaccctggagctgtggtatccccgacacgagcataaggcacagcagcactcagtccacatttgccaaaggaaaggggaacagccaacacgcatgacccctcaccgcgtgcagacgacgcgtgacccctcaccgcgtgcagacgacacgtgtgaccctcaccgcgtgcagacgacacgtgtgaccctcaccgcgtgcagacgacacgtgagaccctcaccgcgtgcagacgacacgtgagacccctcaccatgtgcagtcaccttgctaggcagcttatgtgccttctctcgtttcatcctcaggtttgggaaaattatccagaacttggaaaggggtaaaaacatcactgcctgctctttggatcctggaccctcggcacggtgggcctcagagctgatcattccctggggtggggccgtcctgggcactgctgggtgctgagcagtgtccctggcctccgcccactccacaccaggagctcccctagtcgtgacaaccacagaagccccagacgttgccccgtgtccccgaggggccgaatcacccagaggatcagttgtattccagagcctcgaccagcccggccacccgggggtcactttgtggacgcttccctccactcttgccagtgtcctggctctggggttggacgctgcttgggattgacaaatgcggatgagttttgtccctgagcggcaggtgcctccttcctcctgctgcgtataaaactcagtccagtcctgccgttccttagtaaacactcggacgcacctttgacctacagtggcccgtggtctgaatgaggtttatgcgtgagtgctttgaaagctcaatgttgccatcacctgaagcctagagggcagtgtgcactgggcacctcacttacacaggaggaaactgaggctcagagagggggaggggctggcagtgtgggagctgcagtccttgatctgagctgtccccgtgactttgggagatgaggaaggagcattctgtggcttggctgggggagcccaggtgggaggggagggtggggacacagtggctggtgggcgggggggtgcctctgagccgcctgggccacaggcaaaggggttagggaggtgagaggggagcttgggggcaagggtcatgtgtctccacggccgggcaggtgcacactcccagggaggccacgaggactctgtggcccggggattggagtgaaccacgctgaaaggtcagagggcagtgtcccaacaacagtgcccccgttccagccccaacggcagcccaggggttcccaggcccaccctcactcttgcaggggtccccaggcccaccctcactcttccagggttcccaggcccaccctcactcttccagggttcccaggcccactctcactcttccagggttcccaggcccaccctcactcttccaggggtccccaggcccaccctcactcttccaggggttcccaggcccaccctcactcttgcaggggttcccaggcccaccctcactcttccaggggtccccaggcccaccctcactcttccaggggtccccaggcccaccctcactcttccaggggtccccaggcccaccctcactcttccagggttcccaggcccaccctcactcttccagggttcccaggcccaccctcactcttccagggttcccaggcccaccctcactcttccagggttcccaggcccaccctcactcttccagggttcccaggcccaccctcactcttccagggttcccaggcccaccctcactcttccaggggtccccaggcccaccctcactcttccaggggttcccaggcccaccctcactcttgcaggggttcccaggcccaccctcactcttccaggggtccccaggcccaccctcactcttccaggggtccccaggcccaccctcactcttccaggggtccccaggcccaccctcactcttccagggttcccaggcccaccctcactcttccagggttcccaggcccaccctcactcttccaggggtccccaggcccaccctcactcttccaggggttcccaggcccaccctcactcttgcaggggttcccaggcccaccctcactcttccaggggtccccaggcccaccctcactcttccaggggtccccaggcccaccctcactcttccaggggtccccaggcccaccctcactcttccagggttcccaggcccaccctcactcttccagggttcccaggcccaccctcactcttccagggttcccaggcccaccctcactcttgcaggggttcccaggcccaccctcactcttgcaggggttcccaggcccaccctcactcttccagggttcccaggcccaccctcactcttccaggggtccccaggcccaccctcactcttccaggggtccccaggcccaccctcactcttccagcggttcccaggcccaccctcactcttccagggttcccaggcccaccctcactcttccagggttcccaggcccaccctcactcttccaggggtccccaggcccaccctcactcttccaggggttcccaggctcaccctcactcttccaggggttcccaggctcaccctcacgcttgatgatttgcgaggacgcacggaactcccagcaagctgtcctcgtcacaggtagggtttgtcacagtgccggggtgcaggtgccgtgggctggggaagagcacatgaggcagcgtcccggagaagccccgtggtcctgtccggggaagccgggaactgctcactcacagggcgcacggaccaccaggaaagggcacggcagcctaggcgcccagagctctgcgagggatccctcgtgggggcttgattgactgattgcttgccacggggttgccctcgaactccaagggtgtctgacgctgtgagacccaaggcgctcccaagtcccacggttggtcttgctggtgtgaccctccctaccccagaccaagacgctcccctcaggcagggcagaaatcacctcccaaagccaaggcaaagcccagacctcaccccgcacgagaggattcctcaccccacgggggaaggtgcgggtctcatccgtggcaccgcagcagggctcagccggtgaccaggactgggtgccacgggtgctgggtccgtgcccactccagccccaccagcaggcagggagggtacagggtgctgcagaggaaaccgagtcacagagaacggagggacttgtcaggattctgacccatggctggcagagcacagctccctggggccctctctgccagatggcaggggccggccatgcaagcaggtgtccagtcccacccaggaagggcagcgtgggtccagccctggtccgaattcctgtcctgtcagctgggaggtgtgcgcaggcccctttgccttctgtgcctcggtgtttccatctgtggatggcagtaggcagcgtcttgctgaggattcagcgggtcctcccgcccacccacccacgatgcgcttaatcaacaggccctgccctgcgtgtgaccctggagagaggctctgggaccacgtcactgtacagtagggtaaactgaggctcaggcgccggcccgcgggaatggcccgccctcgtgggaggagcatgtgtgcgggtcggcgtccgcctcctcctttttattgaagtcatttttctcctcctgtcagcggaactggccgtgggcagcccctccctcccacccccaggagctgagaagaaaacaaaagcttaatcgaatccggcactggggcggtgggtgccgcagagagaggccgagggagcccccgcctgggtgggtctgaggccgcctgtaattatggccctgatgtgattatattaattatcgtcgctattttgtgccggcttccgcccggcgagcctgtggattgagctctactgcacacaagccgccagggctcatcacagacagagccttcggcctcgggagcctgagacccagagaagccacgcactgccccgggccacaccccacgtggaaggtggggcttgaaactcaccctgcggctccccacacacgtcagggttagaggttcaaggccccagagaggacaggccgcaaggcaggggccctgggaaggtgttactcctcctcctcggatgggagagacccactg[216 bp omitted]ggggcaggagaatcgcttgaaccctggaagaagaggctacagtgagccgagactgcacctctgtactccagcctgggcgacacagcaagactccgtctccaaaaaacaaacaaacaaaacaaaacaaaaaaactgaaacaagccggcttgagcaaacaaggcactttaccggcccaccctctgagctgaaatggtgcgcagttatggacttcaggcatagctggatccaggtgtccgcaatgtctccaggcttctgactcttcatctgttgttccctatgatggctcccctctgaagaaggggcatctttttgtaatttgcaccaaacggggtgccccccgcttgtggtgcccatggccttcctgagggtcgggagactcaggatggccgccagtctgaaaggagagactgctggcaggtgtgcctgcctccttcaccgcacagcacccactggggccgagcgctctgtggcgccagggatgctggaggtgcaaacagtagattcgttctgctcaggatcaacatcacaaggcagcaaacggccacagccaggagggaacaagggcatctgactcccccggggtgggggctgacctgaagggcagtgggccaagacctgaggcagggcgagacaccacgcaggcgcagaatccctggatgacgcccacttggaagtggaggggggagggcatgggcagctgcagctcccagacaccagcacacacaaacgcacacacaagtgcacaccagcagcgacacaggcacacacaagcgcacacagggtcacacatgcatacacggctcacgtgcttacacgtgcacacgccagcacacaggcagctatactcgagtgcctgcaggcgctcacctggcactgtcacatacgcccaacagatgagcacggtaacggcacacgcagtcacactgcacacacatgcggaagcacatggcgacgtgtgtgcacctacctggcacgcacacgcacacacccgtgcagcctagcgatgagtggctggggctgaagaggctacaaggcgcccgtagccctgtcaacccgtcccaggccctgactggggctcaccaggccgcggtcaggaggccgggctacgctgaaccccaattcccaaaagctcctggtggatttgagatggcagagacatctggaccccatgggcagcaggagagacagagcagcccagcctgggctgagagcacagggacgggtcctgccccgaggggtgtgagggggggacggggtcctgccctgaggggtgtgggggggacggggtcctgccctgaggggtgtgggggggacggggtcctgccccgaggggtctgagggggggacggggtcctgccctgaggggtgtgggggggacggggtcctgccctgaggggtgtgggggggacggggtcctgccctgaggggtgtgggggggggacggggtcctgccctgaggggtgtgggggggacggggtcctgccctgaggggtgtgggggggacgggtcctgtcctgaggggtctgagggggggacggggtcctgccctgagggggtgtgggggggacggggtcctgccctgaggggtgtgggggggggacggggtcctgccctgaggggtctgagggggggacggggtcctgccctgaggggtgtgggggggacggggtcctgccctgaggggtgtgggggggggacggggtcctgccctgaggggtgtggggggggcacggggtcctgccctgaggggtgtgggggggacggggtcctgccctgaggggtgtgggggggacggggtcctgccctgaggggtgtgggggggacggggtcctgccctgaggggtctgagggggagacgggtcctgccctgaggggtgtggaggggggatggggtcctgccctgaggggtctgagggggggacgggtcctgccccgaggggtgtggaggggggaacggggtcctgccctgaggggtgtggggggaacggggtcctgccctgaggggtgtggaggggggatggggtcctgccctgaggggtgtggaggggggacggggtcctgccctgaggggtgtgagggggggacggggtcctgccctgaggggtgtgagggggggacggggtcctgtcccgaggggtgtgggggggggacggggtcctgccctgaggggtgtggggggaacggggtcctgccctgaggggtgtggggggaacggggtcctgccctgaggggtgtggaggggggatggggtcctgccctgaggggtgtgaggggaacggggtcctgccctgaggggtgtggggggaacggggtcctgccctgaggggtgtgagggggatacggggctgtgtctagagggggtctgtggagacagggtcctgtctgaaggttctgaggggaggcgggacccaccctgtagggaccgtgtggggtccgagtcctgtttcctgacatccatgtagtcaagagctggaaccgtgaagcagaacccagacctgccgctccaagggaggtggtttatcaggggctgggctcctgcccccgcctgcctccacccggggcaggagaatgcggagggcagtggaaaggaccttgccaatctggaatcctcttctccttcctccctggagttcaccgcagaactctctcgttattaaacagccagggaagccaacctccacccccgtattcccgaaacacctttattgcactataaacagcatttataaacaaacacagctggggagtgtcttaaagatttacccacagtcaacctcagacactaagatatcaaagagtgcaggggggctactaaacgggggaccccagggagaacagggcctgggaggggtgagcatcagagaaggcggggagcgccggcgtctctctccatgcagggcaccctccccgcctccccggcctgaggagcctccgccctgggtgccctggcttccgggagagagcggagccctgcaacaccaggctcagaaggggcctgcactctccctctggagggctcacaggtgtgtcccaccggacgtgcagcaggggcccagctgctcctccagtcctgggaagcagctcctccaccctcccctggacaagaggaacaatgtgtggcaaacgggctgacaagggacgtccctgggtaccacagatgtgccctggttcctccgtgcccaccagcagccgggagaggcgaaggcactggcctggcctggcccctgctttgagtcttatcatttctgcatcattctgagctggaaacctccccaaaatcattcaaggacccacataaccacacaatggaagccttgcagccacctaacagcaggaaaggccatagccaggtccccccagctgcctcctgggctccgacccacccaccgtagccacagcctatttacacacgtggcgtcaaagccacggccgtcaatcactgcgtgtcgctcccagctgcagacgctggacaaaagggcgacggggtggcagcccccagcgaggacggatgggccatagggctgctctctgggcatctctgagcaagaccctccggcgccacagcagaaatggccagacgggcctgtacccaaaaagccagcggcgacagtgttggaggaaaacaggccaggagagccgtctcctccccgcggacctctgccaagacctcctctgctccgactgtggcagcggctgctccctccgcgcccaccctcgtcagggcaccctcgcctggccccactccccaccggagcctgggaagctggggtctcccagagccaagcctgacccctgggagggggcgtcccgggcagagcctgggcctggtgtggccgcgaggccctgctctccgcggggtgggaactggatggcggcaggctgtgggggaggaagacacacgtgcagtgaaggagactgtgggctccaagacttgtcacctccctgtccacggccccgccctggccacatgcacggattcctgaacccctgagaacctccttctagaactctgcgtgaaaggcgcgaggcagtgtggaggggcaaagggggaccctctgccccgcgaagtggccccttctcttcccccgaggcccctctcctcctcctcctcctcctccaaaggagaaattaattcatgaaaaataatactccagtcagcatcgggtgacccaggaaaccctgcgtcagctacagcatcagcgcccagcccagcctgagtgtgagcccctccccggccagccccagcccaagccagcggacccgcccgccagcacccggtgtggaggagagaccggggtctgccctctgcacccgagcggacagcgagcaggtccccgctctacaggaaggggagcagggaggtcaggggcagctccttctccccgagcagcgtgtcccgcttgaggctgctgcccttgttcaccaccttgatcctgagggccagtttccggacgctggcgggccccaggccgtcgaagaagaaatcctcgttgaagacggggcggcggctgttcttcacgatggtgctgcgctgcttctgcagcttgcccggcaccaggcacaggcccacgcagcagttgatgctgcgggcgtcgcacaggcggtcgtagaggccctcggcggccagcaggtgcacccgcaggcgggcctggccggcctcgtactcggccagcagccgcacgctgccccgagggcccacgtggaccgtgtgctccccacgcgcctggcccgactcggggccaggttccgggggtgcccggcgggtcaggcggcgccggctcccggggctggcgtccggggtgctgtcgtccgcagacagggagccgtggcggcccacggagtgccggagctggctcaccttggcctggctgtcctgggcgaaacctttgagcagagacacggagcgggacagcagaggggacccgaagggggaggactcggccgaggaccctgtgtcgctctccccgccactgaagtagcggccggggctcatgagggccccgccagcctccctggggcccccatcacccccgttggccttggcagctgcccggcggcgcccggcccctggggagcccacctgggccagagccccgtgctcactgtggaacagagactccttgcgcctcgtgtgggggctctcagccagcatggcgaagccgtaggacgtctgggccttgggcaccgagggcagggacatggcaccctgggcctgggggtcggcgtcagtggcctcctcggacagccagtcctcggcactctcgatctggatcacgtgccgggtggctgccttcagcaggctcttgctctcggctgccagcttggcaggcagccgggggctccgtggggtctggcggggggccgcagaggccaggttctgttccgacgtggaggggcccagcgcggcctgtccctcgccctccgcggggcccgagggcagcttgggggggatgaaaaagtcggggatcttgtcgggcgtcaacacattgctgtacaggggccccttggaggccttgtcccccgcctcactccccacgccccgggcagcaccgttttccccagacccccgaagccgctccaagaaccacatgttggtttttctcatgggggcggcaggcaagaggcccggacaggggctgcagcgtctgggaagagaagcaggggtcaggagcagtggggggcggctggcagagggccctgggcacctgctccctgtggggcctcccggcagggccctgccggcggggtgggggtggaggggtcccctgggggcgtcccgcccaggcgcggcggcccaggacaggagtgaggcgggttccccccacctttttccggagagatcccgcttaacttcccagcaccaagcccaggggcgtgggggccgcgctctgactctccggggagctcccagaggagactggcccctcgcccgcccccactctggttttgagcatctcagcgctcattccaaagggttccgcgctcagtcccaggggaagacacggatgtgggtggacccccggggtgtcccagctccgcccccccggctcccacccacctgtggctcctccctggaccggagggccaggcgttcggggtgggggaagggaggggcggtaggtctggggccgagagagcagcgagtcgactccccggtgtccccccgcccccagccctccccgactccgcttggggtggggggtggggtcccggcggtccccgcagaccgggcggggtccccggacttacctgcccggggtgatggcccgaggccggaggtctgttcgcagacacgcaggggtctcggcgcgcaggctcccggggctggcgcgggggacgcggccggagcttcgatgcgggcggcggcggcggcggcagcgcagtcggactcattcacccgcggcgggaaaccgcccagccccgccgccgccgccgccgtattcctccgagtacggccgcccgcgcccgcgcccgcgcccccgcccccgcgggaagggggtggggccgtctccccgcagcccccggaggctggtggcagggaggagcctcgccagggcccgggggctgactgggggccggtgggagacaagcaggtggtcacggttggctgacggccacccccggcgctcacgcccgcagattccgggaagtcggactcccaagcccctgcctccgtataccggaagagggtcccagaccccctactcgctgccggcgaggagctttcccgactaacgacgacgaattaaatgacggcaacagtaataaatgcagctgggtttatgatggagcgtttcctccctgccagcctcccagcgtcctggcgggtctctgactctcacacaacccagtacgcaggtcctactgcaattctcaatctgtagatgaggaaggtggggggtttccttccagaaacaaggaccgaacagctaggacagcaggtcttactaaatgggcaacctctcagcagccctacaagaagcctggaaggggggggctccttcatttcatggacaaacgtttcctgagcacccgcttgatgctggacagtgacctggccaccggggacacagctgggacggagggaggtggccccagccctggtgatgcaggggcaggatgcccacagagcgtacaggtgcagcttagaactgcaggggtggtgacgcccggaacaggaatacagcaggaaagcgtgagggtcggggcgaagagagaaggcacatgcgtgtgattcacggatggagaaacccatagggggcaagaccaggtccaaacccaggcttcctggcagttcctgagaccacagggtccccccctcctgaggccccgacccccctcctgccagctgcttcgtgatctgccagccccggccttcactgcttccttctctccctccctccctgccctccccgcctcagtttcctcttctggaaccgagctgagcagttcccagcctcctcgtgcttggagccagcaagataacatatccccaggaccaacccggagccggcggacgcctggcgctttattgaattattgattgtccaggagcctcctgcattctgggaatgtccccaagtctggatgtggcccaagctgggaggagcggctgctgccacagtggtagaagaggggtccaggagggcgagagagctgggctgaggcctccccactctccacgtacccttgcaataaggggttagagtcctgccgtccagaggggaaagtgaaacccggaggagctgtgaccccatctaagctttgctcacccagcaaacgttgatgagccctcatttttgtgctggggcaaccgcgacgcagccccgaagtctgacaaggaggcagacaccgaggaattctccccttcaccgccgccgcctccaggaagcctgggcaggccccaccacagactagcagggcccccgaaccccagctccagctgccatgcagaatacccttgggctgctgtccaccacccctgctgggcctgaggcgggaggagggtcctgggggtctgtccactgcccctgctgggcccggatcctggggatctgtccaccgcccctgctgggcacggatcctgggggtctgtccaccgtcactgctgggcccggatcctgggggtctgtccaccgcccctgctgggcccggatcctgggggtctgtccaccgcccctgctgggcccggatcctgggggtctgtccaccgcccctgctgggcccggatcctgggggtctgtccaccgcccctgctgggcccggatcctgggggtctgtccaccgcccctgctgggcccggatcctgggggtctgtccaccgcccctgctgggcacggatcctgggggtctgtccaccgcccctgctgggcccggatcctgggggtctgtccaccgcccctgctgggcccggatcctgggggtctgtccaccgcccctgctgggcccggatcctgggggtctgtccaccgtctctgctgggcccggatcctgggggtctgtccaccgcccctgctgggcccggatcctgggggtctgtccaccgtctctgctgggcccggatcctgggggtctgtccaccgtctctgctgggcccgagccgggaggagggtcctggaggtcctgtccctgtagtggccccaaggcacaggccagccatgtctccagtaaacatttgccaaacaaatgggtgaatagcatcgccacgatggccccgaaacagtgctctttcagcaggcccgaggagagggggcctcaggggccacagagccaccctcctccattgcagacaaggacagcagggcctggggagggaagcggacagcttgggtcctaggaaggggcagtgacgggtctcctgacatcaggccagccccaggtattgggggttcgctctccggcacccctgcccagcccaggtgggggcagagcctctcctgccagctgggttgggggatgaggcactgagtttacactatgcctgtctccatgctaggacacaaatccagagctggtcaatcagggcttgaatcctggtgccaacccttcccactgtgtgacgctggacaagcatccagacctctgtctcttcagcagcccagggcaccacggctctcgagggagggctcaacagatcactatgtgcaaagtgcctacagcaccccaccatgtgtgcgaggcaggcgtcagtcgccctctccctcagacgcttctgcaggtcaggaagggtctcaaccaggggggagctggcccagacctcaaagtgcaccccagagccctgaccccaccacagcctggcttggccagaagccccaccccatccccacatcctatcacatttgggggctggggaaacataggcctgaaaagtacctgggatgggtcctaacacctgccctgtggacggacgcagaccccaccctgggtggggcaggggcagggagcccggggccttctggctgcttagctctgcaccatcggtaagtaaacaggagcctctcctggtcaacagaaccttctgcttccctctgcagcagcctcgctgcagccctccaggatgggagaccaggatgctgcagattcgggctcaagctggaggaggggcccaggtggtatcgaccagcccctctccgccctgagtcgtggcgcctcatgctgggaggctttggccctccatccccccaggtgggggccccaccagggacccggggcttcccagagccaggcctgaatccaaggctgccccacagtggcctccaggataacaggcttggaggacctacagggaggtggtttaaaaaggggagggctgcaatccgagctccaatgctgaggaggccactgggtagctgtgcagcttgaagacttaccctgggagcctcaggaaagggaggggacggcgtaacaataaaacaatcccaggagcaggactgtctgcgagctcccaggagggacctgactgattcgtgcatcacgggttagcccagtgggagggccctggagggccaccatcgccagtttccagagagggacactgaggcaccggggagtagcccgattcctcagggagcacatggaaccggctgacctccaggcctgccgcaggcggggtgctcagttgatactagctgattcccggggcatcctgcccctccacggcaccagctgatacccaggtcatcctggccatctatggcaccagctgatacccggggtgtcctggcccttccatggcaccagctgatacccaggacatcctggccatctatgccaccagctgatacccggggcatcctggtcatctatgccaccagctgatacctggggcatcctggccctctatggcaccagctgattcccggggcgtcctggcccctccacggcaccagccgattcccggggcgtcctggtccctccacggcaccagctgattcccggggatcctggccctctatggcaccagctgattcccggggcatcctggcccctccacggcaccagctgattcccggggatcctggccctctatggcaccggctgattcccggggcatcctggcccctccacggcaccagctgattcccggggatcctggccctctatggcaccggctgattcccggggcatcctggcccctccacggcaccagctgattcccggggcatcctggcccctccatggcactagctgattcctggggcatcctggcccctccacagcaagtcctcctgtctcctcgtgcaggggatcgagtgcgattcagggaagaaaacgactcttccaggctgcgcagcatttagaggttgaatgtgacccagggttctcctgcctcccactccaggctcaggctcccgaggagtggattattgacttaattattccaattattggaagtacaaaggtaggaaaggggaggagacaggtgtagggaccgagctggagccaggcgtctggggacccaggctcttccaacccagagaacgggattgggagatgggggccctccaaaaccagcttcaccacctcccagtgggatggtctcgggggtcacctcgcctctccgagcctccgtttcctcatctgtaaagcagggagagtttcagccccccgagttcatgatactcttggctcatgtcccagcaggcgccagtttctatttacacagggacttggaagaggacagacagaggtggagtgtggatgggcaacttgggcccagggcccagggctatgaatgaatgaatgaagtgcatttagacccctctatcctatgcatcttgggaatctgacactccctactccccagcactcctctggtccagcgcctcctccttgccctccccgcaattcccaacagtttacttcccacagggaatgttatcacccctgtgctcaagacccctggcagctcttcctggcaccaggcctcccccaagctctgtgtcctcaccccgcttctgacctcacctcggccacactggccacccttctgctccctgaacgtgctggctgaacacaccacagggcctttgcacacgccatctcctctgcccacgccatctcctctgcccagagctctactttcttcacctggatttcctgggatttctaagctccatgacgcactcttttccacagttgtttgttttgagatggagtctcgctctgtcctccaagctggagtgcagtggtgcgatctcagctcactgtaacctccgcctcccgggttcaagcgattttcctgcctcagcctcccgagtagctgggactataggcgtgcaccaccacgcccagctaatttttgtatttccagcagacatggggttttgacatg[139 bp omitted]gtcacttggccattaactccacaagggcagatctgttttggtcattactgcatcttgtttgcccaccagagctcctgacagataaaagatactcaagcaggtaaaagatactcaatgcaagcatgctgaaagacggtgggtgggtggatggatggagcagtgaagggaatgaaaatgaacaggcgatggatgagcgatagacaggtggatgcatggatgatgaatggatggacagatggaaaatggatagatggaataatgatggaggcttaggccgatggatgggggaccaggtgggtgaatggatagatggatggctgggttactgatgggtgtagatggggcgatgaatgggtgactggatggatggatgactgaaggatgtgtacatgtggagatggatggatggctggatatgcagatggatggttggatggatgagtgggttactgatggatgtgtagatgggggatgggtaggtggattacttgatgtgtaaatgggatggatgtatggttggatgtgtagatggatggatgggtggattactgatggatgtgtagataggggatggatgagtaggttactgatggatttatagatggatgatgcatgatggatggatggatgatggatggatggttactgatagatttatagatggatgatgtatgatgggtggatggatggatgagtgggttactgatggatgtgtagatgggggatggatgaatgggttactgatggatttatagatggatgatgtatgatggatggatgggtgaatggatgatggatggatggatgatgtatgatggatggatgggtgaatggatgatggatggatgggtgaatggatgatggatgggtgggtgaatgggttactgataggtttatagatggatgatggatgatgggtgaatgggttactgacagacatgtagacgggaggatggatgggtggctctgcctccacatctcggaaataaaagacgtgtcattgaagccccttttgggtttgcctttggaaggctccagtcctagttaaggacaaaccagagtggctttttctccccacacacacccttactagacctgtcccccagggcagggggtagggcctgctgtctgcagagaaagcagccagagatcctcggcccttgacagacatggccctgcagggatgtggagaggctgggaacctctctcctgggaagatgctgtgtttgtgggaacctctctcctgggaagatgctgtgtttgtgggaacctctctcctgggaagatgctgtgtttgtgggaggagctggggggtctcttggagccagaagctcagatgtaacatgacggcaggtctaaggaatggagctggggtgcttgagcacgatgctgggcgtcggggaagagcaggggcatcgagggggatgtcctggagagaagctaggacaacaggaaagcccggcccatctagggccatgctgggggcatcttggagaagaaaacaaccagctcttgtctgatgtcctgggctgtcttgaaaggcagaggtttggcattcgggtgataaactagggtgtctccaaggaggtgagagaagtgtttagtggagaagttgaactgtgttttatcctggataaaacagaggtaaccagagagatgcgggggctgctgggcagaggggtcaccccacaatctgccaggttcgggcacacgcacagccccgccttccttctctccaagtccaggcccttagggaggccaaatgtggtccctctgagccccctcatcagctctccacctgggagactcgtcccagccccagccccgcgagggcccccagatatgcaggtgggcttgtgctcttgtggccattcccaggtttaattacaaaccgatccgaacatcccatctgggtcgacagctgggagggcaggactggggggaagctgctgggcgcagcccaggccaggcaaccacgtccttcccctgctcccaggtggagtaggggcctcacgactgcctcgatatccactgtcttggagcagcctggctaccccgagatcccaggtgacctcaaggctgcctgcacttcagcgccagcatgtatcctggcctgagaaccccaaagcaccttaagcgtcccccctcaaagacaactgtgcacccagtcctcaggtgggaagaggaagcccagccaggcccggaatccgcctcctccccagggtcctgggagccctgactctccggggcgttagaccgaaccagccaggcgagagggggacccaagggccagggctccgaggcagcggctgcttctggatatattttctttaaaggcgaaatggttccgtctttggtatgaacaccctcactccaggcaaaggagggggtgggcaggggccccggcaggaggaggctctgcccagcccggggccagctggaggaaggaccatgccagaggctcatgcggaggaaggagaggcagcggtggttcggcctgaccaggatccaggaggagggctgagagccccaaggccatgacaggcaggagccggggctgagaacaggcaggagccagggctgagaacggtcacctgcgggcagaaagagaaggcgaggtcagggctgagacggtggccgcagacctgggctccggtgtgagccacatgctcttctgccttggcatcatctctgcaagtgccacacctcaggtccagcccagagctcctcaggtcgcatggctggggctccggtgcaggtgtcctgagtccttgctgtggacctagggcagtgccctaacctctctgctgtctcctcgcgtgcaagcaagaatgccgatcccagtgcctgtctcagaaccgaagggttgagcacattcctgggacagggcaacggcctcctgagcaggaatcattactgccttccaggttatttctggggtcaccaacgcctttccgaggggacgcaggcagggaccggtgcgaacggaacacaggagcccgtgtgccacaggccgcaggcagtttcaggtgctttacaggagcccctgccatacccggagccccctctgcctgcagcccgaggcctggctgggggctgggtggaggccgcggccgcataggggaggggccgcccaggagagaggaggctggaaggagaccgttgtcatggggacaggagagcggcctgacctggcccagaagcgcagcccttgggaaattccacagccccctccccctgccggccctccctcctccccggctgctctctcagccttcactccctccagccccacagctgcaccctctcctgccccaacctcaccccagaggagagaccatgagatcacccagacctgcctgtccctcctccgtccacaccctaccatgggtccccccgggccccgcaccaaaagtggaggcctggggctccttggcccggcctgaggtatggtcttctcactgcctgggctcacacgccagcccctgcctgtcccagcccaccgtcctctccggcagtgcccacccctcctctgggaaggaggcctggacacccagcacgccgcaggggtccacaaagaccaggtgacgcccaccacagccgaccgcagtgtcacggtcatggctgcacgctgccaccctcgggcacatatccacccacgggcagtgacgcgtgtccacacacaacctgcacacaaaggctcacggcggccaaaaggcggaagcagccccagcgtccatcagcggatgaacacacaaaacgtggtcccctcacacagcgggacattatccagccgagaacaggagccaggctctggcccgggccacggcgcaatgcccctggaggacgtcacgctcagtgagagacgccagacacagaaggacacacagcgtggaatcccattgctatgaaatgtccaggacaggcccatccacagagacaggaggcggatgtgtggggttggagctggggaggggacagggagtgacggctggtggggacagggcttctttcggggctgacagaatgttctggaattcgacagagatggttgcacggctcggatgctgaacacccctgagtcgtgccctctagagggaaaggcacggcacgtgaaccgggtctcaattttcaaatcagaaaagaatctggcaaaggaggcaaggccagcgacccacggcggcagccacacacctggctcagggctcccgtgagaccacgccacgcaggtgcagctcactctcggcggccacgatgggctgcccgttctgcaggtggtggtcgatcaggtggctgatgctctcaaacagcacgtccttcgtccgtacctgcgggacagagacctcggcatcagctcccgggagcccgcctggacccgtggagtaggatattggcgttctggggtcctgccggggagcccctagggtgcctgcatggacgaggggccggaccagggaattccgggacaccagccaaaggatcggcctcagaattccagaaccacccatgggcacgggctctgaaacccccagggttctggggccacgcttcctgtcgggagctgaaaggtgaccgcgggaagatgcggccaggtcccagccctcagagcctgtgaacgtgacctcatttggaaaaaggtcttggtagataaacaggtcaagggtcctgggacgaatgcatccaggatgagccaggggggccctaagtccactagctgctttcctgacaggaaaaggaaaacatgcagatgggcaggagagagcagagattggagccgtgtgtccacgaggctggcagcacccgggagcccggccaccagcgggcgccgggaggggcctgggaccgaggctccctcagagcctccggaaggaaccagccccggccacaccttgagttcggacttctggcctccagagctgtgagaatgaacctctgctgctttaagccacttcgtgtgtggtcatttggtttgcagctccaggaaacacacccctgaaatcctggagacacaggcctgaaaatctgaatcgccaaatcaaaatccagctgcatttttgaacgagaccctcttagcgctaccgagcgctggaactggatgcaaaaccaagagaccctgtgtcccacggctgccgagcagctcctgagtgaggctgggggccctgtgcacatttcacgtgggaagcaggggtaaatccacggctgccgagcagttcccgggtgaggctgggggccctgtgcacacttcacgtgcggaacagggacaaatacacattcctaggcctgtggcacaatcacgtccttctgtgtggcactgggaatgggagctgggaatctgccttttaacaaggtactggtagacgttctgaagcttctccaggtgtagtggctgccggtctgaccccagcgatccatttaacagagaaaatctggcctgggaaagaactgaggtatcacacaccaggctagaggctaggcagtggcggggacaccagaaacagtctgagggggctcaggaactgggagaacaggcagctctcgcccaagccctgccccctccagctctgtcccaggccggggtgcacaagagcccccacctgcccgcccgccgccgtgtgcttcacgcagagaccaggctcacaccagcccaagagccacctgaggattcagctggatggctgaaaacgcctcctacgctctgagaggcctccgaaccctctagcacctcctcacctgggaaataacctgtgcagccctcggacgctcaaaacgcttcataaaccctagaactccttgtaaattggaaaatgctttgtaaacctttaaatgctttagaagctggagattactaaatctcattggcccagagcaactgtaagatgcgccatgattttaggtaccaggaggagagagaagagaaaaacctccctgtaaaataatgatgcacttcaaatatgcaattgatggtttttaaacaaaatccagactctagagatatcaaa[139 bp omitted]tggtgataccccgtctctactaaaaatacaaaaattagtcaggcgtggtggtgggcgcctgtagtctcagctactcgggaggctgaggcaggagaatcgcttgaacccgggaagtggaggttacagtgagctgagattgcgccactgcactccagcctgggtgacagagcgagactccatcaagaaagaaagaaaggaaaggaagaaaaga[161 bp omitted]aaatatgaaaaattagccgggcgtggtggtgggaacctgtaatcctaggtactggggaagctgaggcgggagaatcgcttgaacgcgggaggcggagcttgcagtgagccgagattgcgccattgcattccagccggggcaacagtgcgagactccatcaaaaaaaaaaaaaaaaaaagaaaagaaaagaaaaagagagaaaaaaaggaaaggagggagggagagagggaggaagaaggaattgaagcaattcagtaacttgatcccaaaattccttgtaaattgagacatactttgtacaccctcaaataaattagaacctgaaaataccatatttatccctcagatacatcaccatttgtaaggtgcataagtcatgataaatggggggggagagcatcttatgatggatgaaatcataagattgagattacaactgggaggccaaggcaggaggatcacttgaggccaggagctggggaccagcctgggcaacgtggcaaggccccatctctacaaaacttagctggggacggtggctcacacctgtagtcccagctactcaggaggctgagacaggaggaccacttgagcccaggagttcgaggctgcagagagctacgactgtgccactgcagtccagcccgggtgacagagccagactctgtctcaaaaataaactggaaaatactttgtaattctacagtagctggtcaaaggcaacatctggaacaatctggaaaaacttcataaacatggaaagctcctgcatgccccgagaccctcgagacccttgagaccctcccacctgtgcccagcgaagcccctggatgccccgagaccctcccacctgtgcccagcgaagcccctggatgccccgagaccctcccacctgtgcacagcttaccacgccctcggggtccacgagcagcaggtgcttgggctgcccggcgtgcatgccggtgaggacatactgcccggggttggtgacgctgtctcgcacaaggaagtccccgtcagctcgaagcatcctctctgccgcccggcggctcatccggccgtggtaccagggctcctgacgcagctgttcctccgtgggggccacaggggcccggcgggtaggggggctgggccactggtcctccaagggaagaggggctgctgtcacgcctgccgccactgagcactcatgcaacttcagggcatcctcaaagggtcctgcaggccagggacaggagtgctgggcaggcagggggcaagcagctactcctgccgggaccagagctgggagaaacgggttccccggggagtccctcgtgcacccgtcggcctgcgctgaccgagcgcccacagcgtatcagactcgcactctgcccagccccgtgcgtgcggtgggctcacatgtgtagcaacctggactccccaggttgggttttctaggcacgtactaagcatgtacaaagggtaacagcagctctttctttcagaggttaactcctatttctttttcctgccttgtcaggtgggcttccttcccaaagcgtacgcctctcgtttccttgtctggtcttactgcattggccgcggggcctccaatgtgccctaaatactcaagacgacagccggcacccctctcttgcccctagcgttaaaatgttctgccctgggttttctaacggcttccaacaatgccaacatccgacaggccactctaaggctctcctctgagtgtcagtcccctcattgtcaaacaggggtgggcgtgtccccaggcagaaagcagcatggttcagaccctgcagtgctggagccccagccctgacggagatgcatctacccgtggctggggcggccttgaattcctccagctcctggtcctggggggtcctcccgccctgaccctcactccctggtctcccgcccctccagctcctggtcctggggggtcctcccgccctgaccctcactccctggtctcccgcccctccagctcctggtcctggggggtcctcccgccctgaccctcactccctggtctccggcccctccagctcctggtcctggggggtcctcccgccctgaccctcactccctggtctcccgcccctccagctcctggtcctggggggtcctcccgccctgaccctcactccctggtctcccgcccctccagctcctggtcctggggggtcctcccgccctgaccctcactccctggtctcccgcccctccagctcctggtcctggggggtcctcccgccctgaccctcgctccctggtctcccgcccctccagctcctggtcctggggggtcctccccccctgaccctcactccctggtctcccgcccctccagctcctggtcctggggggtcctcccgccctgaccctcgctccctggtctcccgcccctccagctcctggtcctggggggtcctccagccctgaccctgggggctgagccagctccaactcctagcctggccagtcagcatgttcacctccccctcccagccagcgactggtttggggacgagcacgtggcgaatcagaggcagccccaggactcttcgtggaggacggacgagaagacacccttcctcaaccggggctgcctggcagtctggtcaccctgagggacagcctgcctcagagggaagctcagagccccaagcccctcctttcccatctgagggctgctgtgaggagccaagaggagcaagctcttcacgtagtgcttggtacacagcaggcgcccactaggtgctagatggtgtcattattgtgaagctgaggagaagctgctttgtcaggtggtggaggaaagggagaaatttgcagttagcttgggaggcatcctgagctcaggcaaggaccctacccggcagctcagagccaacacctctccgtgctggagaagggcagagtcgaggctgcaggaaatcaggagagaactctggacacctcagccaaggaaggacaagcctcctccgcccggctgggggctccctcgggctgggtcatccacggggaaggaaggaacgggctcaccgtcagactagccactttgtccagaggtggactaagcctccctcattggactgggcgttccttcaagcaggaagctgtgcctcccccatcaggccgggatttccgtaggaagaatcctcagaccccggagtcacgtgaagagaaaactcatcagactagggagacccagagtcagcgtgcaagaccagcgggccaggcagtcgtcccagcaggccgggattcccacagagaaaagacgaggcctcccctctcagactaaggagtcccatggggcgagggtctggcttcccctgttgactggagggcctcacagacggggccgcagcctcccaccacactgaccattctttcaaggaatgacgaacctcctcccttcagaccgggggttccgacagaggcaggtgggttacccccgagagagtggagcttctcacagagcgggggccagcggcattcccaaccagactgggggttcagcagggaggccccgggagatggggtcctgtaggaggggctgggcctcacccattacactgctcggccgcattcgctagagagaatgggcctcccctgtcagactggccccttttaaggcagagtccaggacacccccatcagacaaggcctccgacaggagacagactgggcttccccgtcccacccgtcgacttgaaggatctcacggggagaagggagcctcccccatcagaccagggaatcccgtagggagtgggggtggggttgtgcctcccccatcagacaacacggccacacgcgatgacggccgccccccaggctgccacatacgcatgtcaaacagatcctttttggggctgtcctccggctcgggggcgtccagaccctgggtgttgacatacaggtgctcctcgtggtccggggggccccgggcgtccgcctgcacgtagccgtcccccggtggagctggggagtgtaaagaggggcagggggtcagctgggagccaggcgaggggctcgcagggagcaaggcggggtcccacgaggagctcccccggccaccacctgtgctgctggctgcagggcggatgctgctctggtctccctgtggtaacccgcccgtctgcaggtgccacagggagcatcttacagcagcaaagccccgtcggggctccaaccagggacaagagtggggcagcgtgcggctggggctgtgggcaccagacgtccacgcccagggagaaggcagccgctgctccaccccaccccgccctggccctccccggcccagggtccagagcttcccagtgcgtgtatgttcagtctccacatttaaaaataatcacagtaactctgcttccctgtaattatgctatcaacatgacgcacggagggtcacttattctgactcagttctatttcaggattttccttcctttct[142 bp omitted]tgaaaccccgtctctactaaaaatgcaaaaattagctaggcgtggtggtgggcgcctgcaatcccagctatttgggaggctgaggcatgagaatcacttgaattcaggacgcacagattgcagtgagctgagattgtgccattgcagtccagcctgggcaacagaatgagactcagtctccaaaaaaaaaaaaaaaaaactatccacatggttcaaaccggaacagcatcgcaggtaaccttggggcatctccctcgggagctgcctggaccccatgtgtattctgccaggtcctgaccagactgcctctgccttggaacagggtctggctgtgaatccacatgaacgtgaggctgcactagcccttgctgggtgacgagggcagaggggcttctcccccgccttcccagtctaccaagaggggcacagattctctcagcttcttagggtcaggatgggtgagagggaagaaacgcagttccaagagtccggggagggaggacgacagtgcgagaggcagagtccggggagggaggacgacaccgagaggggcagagtccggggagggaggacgacaccgagaggggcagagtccggggagggaggacgacaccgagagaggcagagtccggggagggaggacgacagcacgagaggcagagtccggggagggaggacgacaccgagagaggcagagtccggggagggaggacgacaccgagaggggcagagtccggggagggaggacgacaccgagaggggcagagtccggggagggaggacgacaccgagaggggcagagtccggggagggaggacgacaccgagaggggcagagtccggggagggaggacgacaccgagaggggcagagtccggggagggaggacgacaccgagaggggcagagtccggggagggaggacgacaccgagaggggcagagtccggggagggaggacgacaccgagaggggcagagtccggggagggaggacgacagtgcgaggggcagagtccggggagggaggacgacagtgcgagacgcaggcgggtggaggaatccctggaccctggacccgcgctatgggcacatttgtaggagttcttggccagagaatcgggaagggcatgagtgcaagtgagaacagcccgggtgtgggcacaggggcagggaacgctggcgagcccccggtccggggtgagcagccagcatcccagaggaacgtgcgccaggaccagagcacagctgggcaccgggtgggcactcgatggctcgagtttctctgaccagctcgagggctctgacgcttggcagcgaaatgccagattgtttgggaagatctaaaaaaagctcaacacagatgttagcaaggctgttaggaaacaggcagccgcaggcggggctggtgggcgagccgactgcacagccgcctccagggtggactggcaccgccggtaacgtgattaaggccggcgctccgtgacccggcagttcccggctcagcatgcactggagagaagggctcgtgggaacgaggggcgcctgccgcggagctacctgagggagcgggaaggatcctcaatgcccatcaggaatggcttgggtaagggggaattgcacacggcacagggaaggggaattgcacacggcacagggaaggggaattgcgcacggcacagggaaggggaattgcgcacggcacagggaaggggaattgcgcacggcacagggaagggggaactgcacacggcgcagggaaggggaattgcgcacggcacaggtaaggggacaggggacggcgcacagcacacggaagggggcggcacagggaagggggaactgcacacggcgcagggaaggggaattgcgcacggcacagggaagggggaactgcacacggcgcagggaaggggaattgcgcacggcacaggtaaggggacaggggacggcgcacagcacacggaagggggcggcacagggaagggggaactgcacacggcacagggaagggggaactgcacacggcacagagaagggggaactgcacacggcgcagggaagggggaactgcacacggcacaggaaaagggaggccacatggcacaggggaggggacggcacagggaagagaaattgcaccccgcacagggaagggaggatctcttgagcccagggctttgagatcagcctgggaaacagtgagacctcacctccacacaatttaaaaatgtgctgggtgcagtgacgcacgcctgtggttccagctactctggagtgttaggagtgaggactgcttgagcctgagaggtggaggcttccgtgagccatgatcacaccactgccctccaacctgggcgacaaagcaagacgtctcaaaaacaaaaagccaaagctcgaagtgcccggtgggaatgtcggttgagcgggcaattactgattcctactgaaatggcccgagtgcccctccctgggacgcgtttgttgagtcctggcacacaggcggaccgtttaaggtcaccacactgctgtctgtcatggcaaaggcctgcaatcaacgcagatgtccaggaccagggcgtgagtggaataaatgatgtaaccatgaggaagtctggcgtgcacagtgtgggaagaacccctgatgtttgccccatggacacagcaaggtggaagatggatgggtagcacaccctatctgcaaaaacaagggctatgacgcacgtttgaactggcttgaatatccgttgaaaagctaggaaaataactcaggagccactgacagctaacagtggctgcctgatcagggaggcaaagaaaacagatgcagacaggtatgaaagagattgctcattgaacggctttttaaactccatgatgttttgaaccatgtggacgaatgcagtacctatatccaacatgcagagaaacctaatactgtgtggatgacacagtatctacacccaacgtgcacagaaacctaatactgtgtggatgacgcagtacctatacccaacatgcacagaaacctcataccgtgtggatgacgcagtacctatatcccaacatgcacggaaacctcataccgtgtggatgacgcagtacctatacccaacgtgcacggaaacctaacaccgtgtggatgacgcagtacctatatccaacatgcaaagaaacctaataccgtgtggatgacgcagtacctatatcccaacatgcacagaaacctcataccgtgtggatgatgcggtacctatacccaacgtgcacggaaacctaacactgtgtggatgatgcagtacctatatccaacatgcacagaaacctaacaccgtgtggatgacgcagtacctatatccaacatgcagagaaacctaataccgtgtggatgacacagtacctatacccaacatgcacggaaacctcataccgtgtggatgacgcagtacctatacccaacatgcacggaaacctaacaccgtgtggatgacgcagtacctatacccaacacgcacggaaacctaacaccgtgtggatgacgcagtacctatatccaacatgcagagaaacctaataccgtgtggatgacacagtatctacacccaacgtgcacagaaacctaataccgtgtggatgacgcagtacctatacccaacgtgcacggaaacctaacaccgtgtggatgacgcagtacctatatccaacgtgcacagaaacctaacaccgtgtggatgacgcagtacctatacccaacatgcagagaaacctaataccgtgtggatgacacagtacctatacccaacatgcacggaaatctcataccgtgtggatgacgcagtacctatacccaacatgcacggaaacctaacaccgtgtggatgacgcagtacctatacccaacatgctcggaaacctaacaccgtgtggatgacgcagtacctatacccaacatgcacggaaacctcataccgtgtggatgacacagtacctatacccaacacgcacagaaacctaacaccgtgtggatgacgcagtacctatatccaacgtgcagagaaacctaataccgtgtggatgacacagtatctacacccaacgtgcacagaaacctaataccatgtggatgacgcagtacctatacccaacatgcacggaaacctaacaccgtgtggatgacgcagtacctataccccaacgtgcacggaaacctaataccgtgtggatgacgcagtacctatatcccaacgtgcacggaaacctaataccgtgtggatgacgcagtacctatatcccaacatgcacggaaacctgataccgtgtggatgacgcagtacctataccccaacgtgcacagaaacctaataccgtgtggatgacgcagtatgtatatccaacgtgcacggaaacctaataccgtgtggatgacgcagtacctataccccaacgtgcacagaaacctaataccgtgtggatgacgcggcacctatatctcaacatgcacagagacctaataccgtgtggaagacgcagtacctatatccaacatgcatggacacctaataccatgtggatgacacagtacctatacccaacatgcacggaaacctaataccgtgtggataatgtagtacttatacccaacatgcaaggaatctagtgtgtgcaggaaaaacagacactgatgatgaaaatctcagcagagtgttaggagcaagacgatctcatagattaatgtgaaataagcagagaggagaaagactgagggggagccagcacaggacagggctgaggagccccagaatcctcgtgggtaccccttgcagccccagcccatcctacctgtaccggtggaccccacgtcccatggcaggctgcaggcatctcttagagaaggagatgggccctggaaacagagcagtgagaggttccccggtgtgtgcaagcccctcttcctggctctggacccccagtctccccgcccggccctcttagatggctggagacttaggggtggggagcacagccctggccctcccattgctctctcactctgtaactaggccccctgggtctgccgcccacctctgccgtggccttccccgccttctctccacctcggaaggtggtcagcacatcctgccaccttgcaatggctgttccccctgcctggataaccttccccgctctgctctcccaggcagctcctattcaccagtcagggctctacccaaatgccgcttcctcagggaaggcctccggaccgccctacagagtgtatgtccccatggacatcctcactgcctctctggtggacttaccaaggccctgattaaatcattgccgtatttatttagtgtctgagggtagaagtcatgtctgaaatgccacctcgtctaatgtgtccagaggaggccgggcagatagatggcgcttcatcgtgagtgagatcgtgagtgagagttagaggaggccgggcagatagatggcgcttcatcgtgagtgagatcgtgagtgagagatagaggaggccaggcagatagatggcacttcatcgtgagtgagatcgtgagtgagagttagaggaggccgggcagatggcgcttcatcgtgagtgagatcgtgagtgagagatagaggaggccgggcagatggcgcttcatcgtgagtgagatcgtgagtgagagatagaggaggccgggcagatggcgcttcatcgtgagtgagatcgtgagtgagagatagaggaggccgggcagatagatggcgcttcatcgtgagtgagatcgtgagtgagagatagaggaggcggggcagatagatggcgcttcatcgtgagtgagatcgtgagtgagagatagaggaggccgggcagatagatagcgcttcatcgtgagtgagatcgtgagtgagagttagaggaggccgggcagatagatggcgcttcatcgtgagtgagatcgtgagtgagagttagaggaggccgggcagatagatggcgcttcatcgtgagtgagatcgtgagtgagagttagaggaggccgggcagatggcgcttcatcgtgagtgagatcgtgagtgagagatagaggaggccaggcagatagatggcgcttcatcgtgagtgagatcgtgagtgagagatagaggaggcggggcagatagatggcgcttcatcgtgagtgagatcgtgagtgagagatagaggaggccgggcagatagatggcgcttcatcgtgagtgagatcgtgagtgagagatagaggaggccgggcagatagatggcgcttcatcgtgagtgagatcgtgagtgagagatagaggaggccgggcagatacatggcgcttcatcgtgagtgagatcgtgagtgagagttagaggaggccgggcagatagatggcgcttcatcgtgagtgagatcgtgagtgagagttagaggaggccgggcagatagatggcgcttcatcgtgagtgagatcgtgagtgagagatagaggaggcggggcagatagatggcgcttcatcgtgagtgagatcgtgagtgagagttagaggaggccgggcagatagatggcgcttcatcgtgagtgagatcgtgagtgagagatagaggaggccgggcagatagatggcgcttcatcgtgagtgagatcgtgagtgagagatagaggaggccgggcagatagatggcgcttcatcgtgagtgagatcgtgagtgagagatagaggaggccgggcagatagatggcgcttcatcgtgagtgagatcgtgagtgagagatagaggaggccgggcagatagatggcgcttcatcgtgagtgagatcgtgagtgagagatagaggaggccgggcagatagatggcgcttcatcgtgagtgagatcgtgagtgagagatagaggaggccgggcagatagatggcgcttcatcgtgagtgagatcgtgagtgagagatagaggaggccgggcagatagatggcgcttcatcgtgagtgagatcgtgagtgagagttagaggaggccgggcagatagatggcgcttcatcgtgagtgagatcgtgagtgagagttagaggaggccgggcagatggcgcttcatcgtgagtgagatcgtgagtgagagatagaggaggccgggcagatagatggcgcttcatcgtgagtgagatcgtgagtgagagatagaggaggccaggcagatagatggcgcttcatcgtgagtgagatcgtgagtgagagatagaggaggcggggcagatagatggcgcttcatcgtgagtgagatcgtgagtgagagatagaggaggccgggcagatagatggcgcttcatcgtgagtgagatcgtgagtgagagatagaggaggcagggcagatagatggcgcttcatcgtgagtgagatcgtgagtgagagttagaggaggccgggcagatagatggcgcttcatcgtgagtgagatcgtgagtgagagatagaggaggcggggcagatagatggcgcttcatcgtgagtgagatcgtgagtgagagttagaggaggccgggcagatagatggcgcttcatcgtgagtgagatcgtgagtgagagttagaggaggccgggcagatggcgcttcatcgtgagtgagatcgtgagtgagagatagaggaggccgggcagatagatggcgcttcatcgtgagtgagatcgtgagtgagagttagaggaggccgggcagatggcgcttcatcgtgagtgagatagtgagtgagagatagaggaggccgggcagatagatggcgcttcatcgtgagtgagatagtgagtgagagatagaggaggccgggcagatagatggcgcttcatcgtgagtgagatcgtgagtgagagttagaggaggccgggcagatagatggcgcttcatcgtgagtgagatcgtgagtgagagttagaggaggccgggcagatagatggcgcttcatcgtgagtgagatcgtgagtgagagttagaggaggcggggcagatagatggcgcttcatcgtgagtgagatcgtgagtgagagatagaggaggcggggcagatagatggcgcttcatcgtgagtgagatcgtgagtgagagatagaggaggccgggcagatagatggcgcttcatcgtgagtgagatcgtgagtgagagatagaggaggccgggcagatagatggcgcttcatcgtgagtgagatcgtgagtgagagttagaggaggccgggcagatagatggcgcttcatcgtgagtgagatcgtgagtgagagttagaggaggccgggcagatggcgcttcatcgtgagtgagatagtgagtgagagatagaggaggccgggcagatacacggcgccccattgtgagcctgtgattgagtgagtgagtgagatcctgagtgagatcatgagtgagtgagatcatgagtgagatcatgagtgagtgagatcatgagtgagtgagatcgtgactgagatcatgagtctgtgagtgagatcatgagtgagtgagatcatgagatcgtgagtgagatgatgagtctgagtgagatcgtgagtctgtgagtgagatagtgagtgagactgagtgagatcatgagtctgtgagatagtgagcaagtgagtgagatcgtgagtctgtgagtgagtgaaatcatgagtgagatcgtgagcctgtgagattgtgagtgagattgtgagtctgtgagtaagtgaaatcatgagtgagtgagtgagtgagtctgagtgagagaccctcctctaggatcgaggagaacaggagcagaaagaagagctggaggtaggtccagggaaccagcagctggggcatccctgtccccatccccccgagggcagaggctgacctggtcgagggccgtgagggcgcagggctgtgtcagggccagcctggagtccactagcccgcccagcggcggctccttccccgggatgctgttgtagtaattgtgctccaaagagtcctcctcgtccccccaggccgactcctccggccctgccagcctgggggacagacaacaacggccatggcacaggcagggcccaagggggctaaagccttacggcttgagcttctgggggagcaggaaatatctgagttcgaatcccagccccccacctgtcactgagggttcctaccgggaaacgcttctagagccagtgaccaggcccactacttcctcatctataaaatggaatgttgcacacatttccgagctgtagcacaaaaggcaggtcgttggcaaacccagtctccactcctttctgcccacctccggccccgcccggcagcagagggcatgagccaagtttatacccagaaccaggacatcaccggtcagggtggcaactctctgggatcaaagcgcccccgccctctggccccgatggcactggcaggaattgatcctgcaggtgctcctcagcaagcacggccccgagagccagaggggtgcaccccacctggcccacagtcgctgctgggataaattatgaagcagcctacggaaggcagaggcagctctggaggcaggcgaggagcccgtctcagcttcggagcgtgctgagcaacgtgcatcaagcacgctgtccccgtgcacaaaggggtgagtgtgagcaggcgtgcgatgccgcctccctcgtgaccagcaggctgggagctcatgcacctgcacctgccctcccaccattggaggaagctgactttctaatgatgaatagagacttaaatagctccttctccaaggccagctggcaaaccccagcccagggccaaatccagctcaccgcctagatctgtgtggcccacgagctaagaatgggctttcaatctttaaattatcaaagttaagtgtttgagaaaacatctagagaatcatattttgcaacacgtggcattcacacttcaatgtctataaaaaacgtgttaccagcacacagacacgtccccccctttacacatgttctgcggtgagacggaggccgttttctgcccattgcgggagccggccgcgcgtctggaggagggatattggttgtagcagcagggctgacagcctcaggcacaccggggagtcagcttgcttagtcctccccaatcctggggggcaggcggggatgcgtttactcgggtgttaacagccgaggaaacaggatcctctggctgagccatattctcacgggacagggagggagggacaagggcaggacggaggctgaggcctgcaggaggtggagcaggctctgcacctgggcaggtcactgggggtgtccccagggcacgggggaggcagctctggttacctttctgggggcagcgccaccttgggcgggctgtgcaggtactgcttgaagcgcagctcgaaagcttggcccacggtgctgatgatgctctgtgccaggccctcacagcactccaggatgtggcaggctgcgggcacgttggtcatgcagcctccgagccacacggccgtgccccccagccacaggacccccaccggcctccccgggggcctcacctctctggttgatggggtccttggcgacgtaggccacgtaatccgtcatgtcctgggggcggggaggggccagctggacctgcctgggccccccaccgggattcccagctgcccaccccagcaatgcagagagatggggcagtggatgtgggcacagggtacgttaggcgggctctggggaaggatgagagggtctcgcggccggaggggggcggcagggctgcaggtccacccccatccctggcctcaccgtgtctccgcctgacgcgaaggagatggacggcatgtggtggttggcgatgacctgtggcggcaggaggcacacgcggtcatgggggccccgcttcgagggcagggggcccggcagatggaccaggaccacagcgaagagtggggcaggggcagggatgtggggatggagacgtctcctggacaggcacccactgcagccgggtcctgggtcagcctggacgaccgaggctgggatgtggagtccccagcaaggaagggactagggccctaagggatgtgtggggtccgcaggaggtcacacgggaatgtgtgtgagaggacaaacctcccccactgtaacacttcacacatgtacctgcccagacgctcacacacacacaccccaagccccacacacatgcacacacacacacacacccgaagcagccacgggagggacggccccacactcctgactcccttgtccacgtgcaagggcacctgtgagtgcatttgcatgcttatctgcatgctcatttgtatgcttgtttgcctactgatctgcatgctcgtttgcatgctcatctacttgctcgtttgcgtggtcatctgcgtgctcgtttgcgagctcatctgcgtgctcgtttgcgtgctcgtctgcgtgctcgtctgtgtgctcatctgcgtgctcgtctgtgtgctcatctgcatgctcatctgcgtgcttgtttgcatgctcatctgtgtgcttgtttgtgtgctcgtctgcgtgcttgtttgcatgctcatttgcatggtcctgcttcatttgcttcccgtcactcaaatccctctaggccccagtaagcccccgataccagccacgtcctgagtcctccctacagaacatccacttctcagcccccatagggaccctcgaggctctccccttgccaaccccggcccagccaggagggtctgcttggagcctcagtatcctgtccatatagtggtcaggggtccatgcctcgcagggtgggggcagagatggaaattgcgtggaaatggccctcagtcacccccccgccagctccatccttctctagcctcctccctggagccccagctgcccctcaccgccacctgctgccaccacaccagctcagagatgctgtctcaccccaaactcctcacgatgatccatgctaacttctccgacaaggcgatgcctcctctttcagccacacctgagattcccctcctcaccacctcccagagccctccaggaagtctcttctagcacccagagcccagcacatgctcaggacacccctcacctggcctcacaatgcttcctaaaatctgttatttcctctatttctgcaattatagttttttgttttttggttttttgagacagagtctcactctgttgcccaggctggagtgcagtagtgcaatcttggctcactgcaacctccactcccaggttcaagcgattctcctgcctcagcctcccaagtagctgggattacaggcgcccaccaccacacccggctaatctttgtattttttgtagagtcagccatgttggccaggctggtctcgaactcctgacctcaagtgatctgcccacccctcagcctcccaaagtgctggggttacaggcgtgagccactgagcccggcctcacagtgctggggttacaggcgtgagcaaccaagcccgagcctggtctgcaattatacttttgttgtttgtttccacttgaggactgatagccagggtttatccccgcccctccccaggcactgtggatgttgggacggaccactctctggggtggggcgtcctggcccctgcagggtgctgagcagcgtccctgcccccacccactccatgccaggagcgcccctgtatcaggacggctcgcccaggtgggagcccctgagctgagccccgtgagggcagtggctgcacccccagctcctgctcagcggggcctcggctcgtctttctggataaacgccacctgctgcccgcccccagcaccccacctggctttgcctcctaggactcctggcccctctgggggtctggggacgccaggcgaagagggcagacccacctggcgcgtggcaggcacggagaggctgaggccatcagtggagatgtggatggagatgctcatgccggcaaagcgaaggttgctcttgcccaggacggacgccagggccttgttgggggcctgagttgggggcggagcacagcgagggcggctgtgggtgggggctgtcgaggggctcccaggatggccgcagcgtccccacagcccccgactgccccaccagccccacgagagaccacaagcctcactcacctttttcttccaggatccccggacgccaggcacggcctcatggagccggttgatggcttccctggggttgggaggagggggcttagagagtgtggtgggggtggccatggagggagctggggaggaaggggtcagagagggcgggggtctggggagggggcaggagctcagagaagggcgagagagaggggagaggaaggcagagagggaggggtgggagaggatcagggggcctaaagtgggcagggagggggctggggaacctgggggaggagtgccccacaggacaggtgcagcttgggcaccagcccactccacgtgcgtccttgcatccggcagaggcccggcccccagctctggcccctctaccaccctctttcccagggaccagtgtgtccctggcctcggcccacaaggaaggctcggcatcagatgtgggggttggagcagcgagcaggaggccctgagcctgacgcggggtccgtgtcgagatcctgtctgcagcctgagtggtggcaggagctgaccccaaacaagagcgcctcagaccactggtccccaggagaggttagaagtctacagggtcctgaaggggccccggaaatgtcggcgtcacgtggagaaaccagatcccccacccagggcatgtgggaattttcacagcacggccactgtggaaaacagcctgggggctcctcaaaaggttaaaaattggccagatgcagcggctcctgcctgtcatcctagcactgtgggcctgacacaaacaaatgcatgcaggcgcggcggcccccacctgtcatcccaacacttggggaggctgagacgggcggatcacctgaggtcaggggttcgagaccggtctgaccaacatggagaaaccccgtctctactaaaaacataaaaactagctgggtgtggtggtgggcgcctgtagtcccagctactggggaggctgaggcaagagaaatgcttgaacccaggagacagaggttgcagtgagccgacacggtgtcactgcactccagcctgggcaacagagtgagactccatctcaaaaaaaaaaaaaaaaaaggagcaaggctctgacccaggccacagcgcggacacacctcgggaacgccatgctcagtgagagacgccagacacacgaggccacgcagcgtgtgatcccattgctatgaaatgtccaggacaggccgatccacagagacagggaggggatgcgtgggtgccggggctggggaggggacggggagtggctgtgatggggacggggtgttttgatggggtaatgagaatgttcggaactagacagtggtgatcgtgtgactctgtgaagagcctaaagtctcaaactgtacattatatctcacatacgcacgtgtaaactgtctcacatggtttttttaagtctatacgaatggaatcaaccagttttcacagaaaaaaagggtgtcgctctcttccctgcttaagccctggccatatccacagcccctgtgattgctttccagacaccgcatagcatcctgaggtcaccgtgtggaaaacagagcagggacacggagacgccactgggccccggtcccagagggaacccgccaggccctgcaccccacgccgtgcggggacttgcccagcaccctgtgagcgaccggcgtgttctttccatcttagaggatcgaggtctgcagggcacggtgaccgacacctggcgtggggacagggcggagacgtggcgtgaagtgggagggaggtggggggcaccgaggctgcgtcctgggaccccagcgcggctgtcggagagcccatcgctgccgccctccagtgctgccgccctccagtgcgtcactcagccctacgcggccagggcagggttggaggctcacctggtcacctgcgtgcgcgtgttaaagtccagggagcgcatagagcggagaacctcgatgcagcccatgtactgaggggagagaacaggtgtcagatgccatcggaacccccgcagtggagccacgtcccttttcccagcagcccttcgccgcctccaccacccctggggtcgagccctttcctctgtccctggtggctctggggccgtcgtgcctcccccacctcaaggcccagccttgacactgtcctgcgagccgccccctctgactccaggcatgtttttctgtgttgctgtttctcaggagcctggtggttcccccagacgctctatgctgcttgttcatttaaccgtcttgccctcgtcggtctctttctgttccaccagcaccgaagccgaggagcgtggggatggtgcgatcctgagcacttccctatctccagcgcccagttcagggtctggcaaacagtggggcagacgtccagggcagccacagatgcacacactgctggcctcgccctccacaggaagtttgcgggcttctggcccagacagctgtttccatgaaaagggaattcaccatctcaatgactgataatactgagggacgagaggggcagaggcgtcccaccgagtccctgacctgcttcagtgccgtaaagggtgggggaacagggccaggaggcgaaggccacagcgtccttccaacgttggcccttgctggagggagggtaaggggcacagcccacgtcatctctatgaaatgtcctacagaggcagcaagagcatgtgtgggtgccaggagccggggaatgaaggctgacacgaacaggtttcctactggggtcatgagaaattctggaattagacagaaggggtggtggcacgatattatgaatgtacgaaatgctactgaactgtgaaaaatgcaacatgcaaaatgatgaataacgttatgtgaagtccacctcagtttctttaaatgatcaacacgcaaacactttgaccctgcagctccatttttaggactttaccccacagatacatcagcctgagggcttctgaggtgtgtacaggtcactgtgtgggccggcccaggctctgcccctctccacggctccatgtacctggagcagggagagcaaggagcagagacagatgtgagaatgcaggcaggaagcagaggccacaggacctgggctgtgatgacgggcaggggctcatcctgggccagctggggagccagggagcacttaagcagggcatggactaagcagcctcacctcctgttgaatggatgcatgatgggtggatggactgacagaaagatggcaggtggatggatgaatgaaagaatggatggaagatgaatagatgggtgggtgagtgggtgaacggatggatgatgggtgagtggatgatggatggatgggtagatggatggacaggcagatggacaatgaatggatgggtgggtggatggatggagggtggaaggatggatggatgggtgggtgggtagatgagtagatgagtggatgggtggatggatggatggacagatggatggatgggcgggtggatggatggatggatgaatgggtgggtggatgggtgggtggatgggtggatggatggatggacggatggatggatggatgggtgggtggatggatgggtgggtgggtggatgggtgggtgggtggacggatggctggatggatgggtgggtggatggacgggtgggtgggtgggtggatgagtgaatgggtggatggatggatgggtggatggatgggtgggtggatgagtggatgggtggatgggtgggtggacgggtggacggatggctggatggatgggtgggtggatggacgggtgggtgggtgggtggatgagtggatgggtggatggatggatggatgggtggatggatgggtgggtggatgagtggatgggtggatgggtgggtggatgggtggacgggtggacggatggatgggtgggtggatagatgagtggatgggtgggtggatgaatggatggatggacgggtgggtggatgggtggatggatgggtgggtgaatggatggatggacgggtgggtggatgggtggatggatggatgcatgggtgggtggatggatggatgaatgggtgggtgggtggatgaatggatggatggacgggtgggtggatgagtggatgggtgggtggatggatggagggtggatggatggacagatgggtggttggatgggtggacagatgggtagatgggtgggtggatgaatggatggatggatgggtgggtagatgagtgcatgggtggatgggtgggtagatgagtggatgggtgaatggatggacagatggatagttggatgggtggacagatggatggatgggtgggtggatgaataggtgcatggatgggtgggtggatgagtggatgggtggatggatggatgggtggatggatgtgtaggtggatgggtggatggacggatggatggatgggtgggtggatgaatggatggatggacgggtgagtggatgggtgggtggatggatggacagatggatggttggatgggtggacagatgggtggatgaatggatggatggatgggtgggtggatgagtggatgggtggatggatggacagatggatggatgggtggatggatgtgtaggtggatgggtggatggacgggtgggtggatgaatggatggatggacgggtgagtggatgggtgggtggatggatggacagatggatggttggatgggtggacagatgggtggatgaatggatggatggatgggtgggtggatgaatggatggatggacgggtgagtggatgggtgggtggatggatggacggatggttggatgggtggacagatgggtggatggatggatggatgggtgggtggatgaataggtggatggatgggtgggtggatgagtgcatgggtggatggatggacggatggatgggtggatggatgtgtaggtggatgggtgggtggatggatggatgggtgggtggatggatggatggatggacgggtgaatggatgggtgggtggatggagggtggatggatggacggatggttggatggatggacagatggatggatgggtggatggatgtgtaggtggatgggtggatggacggatggatggatgggtgggtggatgggtggatggatggagggtggatggatggacaggtggatggttggatgggtggacagatgggtggattggtgggtggatgaatggatggatggatgggtgggtggatgagtagatggatgaatggatgaacagatgaatggactctaggcatgtagtagacaggtcatacctaaaggaattagccatggtccctgtccctagcactggattctcccactgaggaggcagctttggtgggatgctggctgctcaatggctgtcttctctcaggcagagcatgtgcctctgggatgatgtctgtgccagtgtctggcgctacagggccatagggtgagggattctcattcccttacctgcccccttattaacacgtagcccactccggttgtgcggctgaaaccctgaactgtgtggtccatgggtcccgttgtggggacaccagcctagtgcacgggggaggtggggggcaaaccctctgtggcccacggcagctcacgagaggaaatgcaatatcctattcggttgagaacagggactgcaaactcagatgcctacagccttcaggatcagccaggtaaacacacgaggtaggatgcaatgcagtaacgataccgacacctcgctaactcagggcgcttgtcacgtgtaagtctctgctgcggacacgctgtgcacagcatcctttaatccactgcacgcagatccggtaatgataccaacacctcgctaactcagggcgcttgtcacgtgtgaggctctgctgtggacacactgtgcacgtggtctgttaatccactccacgcaaatccacatgccatgggcagcaatggcccctcgggaaacaggcccgggtgggagggtgactgacctcctgggccacacggcccgcagagctgggtcctgaacccacacccctgggctccaggatctgcactgctccccctgcacgacgggaagaggcggggacctcagctcactgcatgtcccacgctccacggcgcccagtgctgccggccatgtgcttttttaaaaaagagaccagaaattcagggcttttctgtgaaattctcccagtttgtaaatatcgatctagggctgaatatctgtgcccccctcaaaatccctctgtggaaacctatgccccactgtgagggtatttaaaggtgggcctttgggaggtgaggaggctatgagggctccaccctcaggactgggatcagtgcccttataaaagagaccccagacagagcccagccctccaccacgtgaggacacaggagaacacggccctctgtaaagaggccctcgccagacactgaatcttccggcgcctcgatcgtggccctcccagcctccagaaccgtgagaaataaatttctaggcctggcacagcagctcatgcctgtaatcgcagcacttcaggagacctaggtgggaggctgtctcgaagccaggagttcaagaccagcctgggcaatgtaatgaggcctcatctctacaaaagaaaaatttttaattagctgagcatggtgagtgtgggcctgtggtcccagctactcaggaggctgaggtgggaggatggcttgagcccaggaggttgaggctgcagtgatctgtgatggcaccacggcactccag[144 bp omitted]agaaaccccaactctactgaaaatacaaaaataaaaataaaaataaaaaaattagctgggcgtggtggttgcatgcctgtaatcccagctacttgggaggctgaggcaggagaatcatttgaacccaggaggcggaggctgcagagagccaagatcacgccactgcactcgagcctgggtgacagagggagagtctgtctcaaaataaaaaaaaaaaaagacaagcacagagggagatttgagagacagagacacagaagggaggggccgtgtgcagccgaggacaccaaggccggcccccaggcaccagacacgggagagaggcctgggacagagcctccctcagagcctccagcagaaaccagccctgcccacaccttggctcggacgttgggccccagaactgtgacagaacaagtctatgtttgtgtgtgtgtgtgttttgttttgtttttggggtttttgtttgtttgtttgagacggagtcttgctctgtcgccaggctggagtgcggtggtgcgatcacgactcactgcaacttccgcctcccgggttcacaccattctcctgtctc[131 bp omitted]tctcccaaagtgctgggactacaggcgtgagtcaccgcgcccggctgtctgtgttgttttaagccccacagtttgtggtggtttgtggtggcagccccgggaccctcccacagaagatggggaggagccctggcggcttcacattcaaccttcccctttgcaaattcagaaactgaggcccagagagaaggcatgacccagaacccaccccaggacgttaagggaaggagccactgtacaagtcagtaaaccgaagcccagagaggggatggcacctggccggcctcacgcacgcagcaggccagggcagatacaagccgaggtccccatgtctgcactcccagcctgggagaccgtccgagtctccgccaccgcccacgccagccaccgggacccacctcataggctttgccatggtctgtatcgatgtcatttacttggtattttccttctaaataaactccacttacaaacataattgcgtttactttttaaaggaaattgcaggaaacaactaaaatatctatcaacggatgaactgataaatgcagtggggtccatccgcactctggaacgtgacccagacgtgaaaaggagcaagtctccgatacgggccatggcacggacgcaccgtgaggacgccggacaggaaaggccacacagcgtgtgatcccatttctatgaagtggccaagacaggccgatccacagaggcaggaaggggacgcgtgggcgccggggatggggagggggtggaggggagggacggctgagggcaggcgataagtttccattttgcctgacgggagcgtcctggaactagacacgggtgagggttgcagaaccgtgtggctgcactaaatacaccgccctgcacagtttaaacagttgggattagggtatgcgaattatatctgctttttcaaaaatttgcatgagagccgggcacaatggctcaggcctgcaatcccagcactttgggaggccg[131 bp omitted]ctgaggcaggagaatcacttgaacctgggaagcggaggttgcggtgagccgagatcgcaccactgcactccagcctgggtgacaagaacaaaactccatctaaaaaaaaaattaaaaaattatatgagaaaaagaggaaacttcacactgcaaccataactccctggttttccattaaaataaatatattaataaaatgaaaagtgtccattcacacaagaaccctaaggttttgctaaaaccagtgcgtgaaggtttgctgggagctgggagccaggatgtctgcacagtgtcaacatctgtctccccagatcacgttccagggaaggaagaccggatgccggggccagggctggggaggccgcaggcagcgcttgggctggaaacgtgcacggcctggcctgcgagtggctcccggggcgtgcactgcgacgtccccatgcacccgagtcccaattccacgagtccccgcagatcttcctcattataagggaaataaacagagctttacgggggagaaaagtcaccttcaccaagtacattcatttcccagggctgccgtgagcaaaggccacacctgggggccacgggagcggatcctctccacgtcccagagccgggagtctgaggtcaagctgcgggcagggcctcgctccctctgaagccccgggggagggtccttcctgcctcttccagcttctgggggctcccggcgtcccgggcttgtggccgtgttactccatctctgcctcctccacacagctgtctccttctgtgcagatttccctcttcttagaggacacgagccattgcatttaggccccaccctatttcagtaactccagtgtggcctcatcttaactaaccacgtctgcaaaggaccttttccaaataaggacgtgagttttggggaacaccgttcgccccaggacactaggtgatcaaagtctccagcaccagtatcaggacaaaccagcacccgggggcctcctgacacgaagggctgggaaaacacagcacccctctgtgcgtcctgccaaaaacacaacctcgactcaactgcaggcaaacaccaggcagacacaaactgagggacggcagcccagcagccggtgtgcactcttcaacactactggctccatggatcccaggacggaacaactgtgaggctaaaggtggtaaaagagacaggacggacggggcaagtggctcacgcctctaatcccagcactgtgggaggccgaggcagacagacggcttgagttcaggagttcaagaccagcctgggcaacatggtgaaaccccgtctctacaaaaaaaaaaaaatacaaaaatacaaaaagtagccaggcatggtggtgcacacctgtagtcccagctactcgggaggctgaggcaggagaatcgcttgaacgcaggaggtggaggttgccgtgagccgagatggtgccactgcactccagcctgggcgacagagccagactctgtctctaaaaaattaaaataaataaaataaaaattagctgggcgtggtggcacacagctgtggtcccagcagcctgggaggtctcagcaagaggctgaggtgcaaggatcgcttgaacccaggaggcggaggttgcagtgagctgagatggcaccattgcactccagcctggatgatccagagcgagatcctgtctcaaaaaaagaaaaaaaaaggcaggatggctaaatgcaatgtgggatgggaaaataaaggttgctctgacaccgttgggaaaactggtcacatttgaatacgcactgaaaatgtgatcgcaggattgtaacggtacatttcctgactttgttaatcataccatagctatgctggagaaaatccttgtccttagactatataccctagcgtgtttgagggtagaggggtatcacggctgcagactttctcaattgttcatcaataataacgacagtaataataataatttatacagtgggagcctaaggtaggagaatcgcttgaacccgggaggcggaggttgcaatgagccgagattgcgccattgcactccagcctgggcaacgagagcaaaaccgtgtctcaataatgataataataataatttatacagacagaataaatgaggcaagatgttaataatcggccagtctaggtgaatgacacatgggaactctttgtactagtcttctttggaacttttcgtctcaatagaattccaaacttacaaaagctctacgtagtctactgttcttgtttctttgatctaaggttgaaactatttaaaggcaaatttctttgacaccctgcgccacgctgaccagtgccgccctccacccctggccaggaggacgcccctcccactggccacagcccccgtcagtgcccctggccatggctttccacaggggcgaggggtgtgtgctgccctgggggtgccgcggaaatgtggggccctgttggccatcatcgcgaggctgggcagccggcgctacaggaggggggggactcacaatgacaccgaactgtccccagggcctcggagcttcctccaggcatcttgtggggaaagccttccatgactgccacacgcctccaacctaactccacgtggcccatgacgcaagagagtggcgcgttttcgtgtgcttgcttttttattgtggtaaaacacacataacataaaatttagagttttgactgtctttaatcgcacggttcagtggcactcagcgcattcccgtggctgtgcagccaccaccaccgtctctccagaacgtcctcatcttcccaaactcaaactgaccccacaaaacacttactccccgtcccctccccagccccatcctactttctgtctctgtgaatctgatggctctggggacctctgatgggtggaattgcacaaagcttgtccttctgtgtctggagtctctcaccgagtgagacatcctcaaggtccgtccgtgccgtggcctgggtcagagcctcgttccttttcttggccgcgtcgtatttcagcgtgtggatggccacactgtgttgatccactcatgcctgggtcacagcctcgtttctttccttggccgcatcatattgtcatatttcagcatgtggatggccacgccgtggccacgtcatatttcagtgtgtggatggccacgccatggctgtgccgtatttcagcgtgtggatggccacgccgtggccacatcatatttcagcgtgtggatggccatgccgtggccatgtcatatttcagcgtgtggatggccataccatagccacgtcatatttcagtgtgtggatggccacgccatggctgtgccgtatttcagcgtgtggatggccacgccgtggccacatcatatttcagcgtgtggatggccacgccgtggccacgtcgtattttagcgtgtggatggccataccatagccacatcatatttcagtgtgtggatggccacgccatggctgtgctgtatttcagcgtgtggatggccataccatagccacgtcatatttcagcgtgtggatggccacgccgtggccacgtcatatttcagtgtgtggatggccacgccgtggctgtgctgtatttcagcatgtggatggccacgctgtggccacatcatatttcagcgtgtggatggccacgccgtggctgtgccgtatttcagcgtgtggatggccacgccgtgggccacgtcgtatttcagcatgtggatggccatgctgtgttgatccactcatccatcaacagacacctggactgtttccacctttgggctgctgggagttatgctgctgtggccgtgagtgtacaaacatcccctcaagtccctgctctccatttctgggaggtatatatccaagaagtgaaattggtggatcataaggtaattctctttaactttttggcattttttgtttgttttgagacatagtctcactctgtcgcccaggctggagtgcagtggcgtgatctcggctcactgcaacctccacctcttgggttcaagcgattctcctgcctc[134 bp omitted]tgcctcccaaagtgctgggattataggaatgagcctccgtgcctggcagcatcgtttttatacaagttggactaaaatagttgttcactattttagaagccaaatcgtccgtgtgactccagccgtggtgtcggagctgcagaatggcagcctgcatctgccccgtctgtggctgtcacaggaatggtggcctttgtggcggcctctgtgcttcccggagagtggaccctgcacatttacaggctgaaacatattttgagttactaggaatcaccaccattgcgtttctccgtttcactgcggttggggcatcgtactgacttggggggaattcctgcgtaggtgtgcgtttctccatttcattgaggttggggcatcgtactgacttggggggagttcctgcgtaggtgtgcgtttctccgtttcattgaggttggggcatcgtactgacttggggggagttcctgcgtaggtgtgcgtttctccgtttcattgaggttggggcatcgtactgacttggggggaattcctgcgtaggtgtgcgtttctccgtttcattgaggttggggcatcgtactgacttggggggaattcctgcataggtgtgcgtttctccatttcattgaggttggggcatcgtactgacttggggggagttcctgcgtaggtgtgcgtttctccgtttcattgaggttggggcatcgtactgacttggggggaattcctgcgtaggtgtgcgtttctccgtttcactgcggttggggcatcgtactgacttggagttcctgcgtaggtgggtgttacaggtacacttgggtttcatttcaggagtgaaggatcacagaatgcttgctataaatagtggtagttgatcggcaggacggccacacgcagctgcagctggtggatctcagacctgagtgtgactcagaatcacctggaggactcacaaaacgcagctctccaagccccccagagtctctgacccagcaggtctggggtggggctcgagaatcagcatttgcaacaggttcccagatgccgctggtctttaagccagtttggtggccccgttcccttccacaagtgaagggtttgccatttccagccaatggaggagggagaacggccggagtctctcacaaagagctccaggaagggatgacctctgctcccagtggacgtggccgggtcccagcgacgtcgggtgctgtggccaccattttgtgaccctgaaggtcgccaagccagcgtgcagaggacggcggcacagaaagatgggagagactgtggtcacaccgtcctgaaaacagcccaatgttgtctggccttggaagctgagcagggtcgggcctgattggtacttggatgggagaaggacagaaagaacccagatatgggttctttgttctcagaaacaaaacctgagttttgtttctgaggcagggtcttgctctgtcacccaggctggagggcagtggcatgatcttggctcactgcggcctcgaattctcaggctcacgtgctcctcctgcctcagtctcccacatagccgggaccacaggtgtgcaccaccctgcctggctaatgttttttcttttttggtagagacagggtttcaccaagctgcccaggctggtctcaaactcctgggctcaagtgatcctgccgccttggtcttccaaaatgctggattacaggcgtgagccaccacgcccggccagaacccagatctttagggatgctgtcgagccatgggattcatccaccgtgtcaactggccacacctgacccctcgccttcaaggaaaagctgcatttggagctgaaccatctccagcaccctctcacaactccccgcacctcccagcttaagggacccgcgatgcaggaaggatgaagtgtcattttgccgaccgtgtcccagtttgcgtccatcccccaccgggcctgggctccacgcacctggagcagagccagacacgcacaggaaactctccctgaagtgctcacgaggtgaggtgcgtgagggcaccgcagagagcaggacggcctgactcacgggacttctgtgtatggacgagcccagcgccaaaatggtacgtgtgggagaacacggggtcggtgtccacagaccttggcacgaactctggcctctccaggagacaagctctgtgtctttctcaacagagacatcttgctcagatctacgccttcgggtgaagcccaaagatcaggcgtcaagattcacccagaccgagctgtccagcacggcagctgcttgctgcctgtgaccacttgagaaaagtcaggtaaaatgaagctggcactgcaacagcacaggccacacctcgaggcccagccgcccatgtgactcacggcagccacactggacggtgcagacacggacggttctgctgggcagtgccgggctgggctcatgagacccacggcaaagtcggcgggggattctcaggaaaaatgtccccattcacaaaaggagccccacagagacaggggaccctgttctgccaaaccagagccactgcctttcagccaggggaggaactgacccagcagaggccccgggaaggcggtcggtctcccgtggctgccctaacagatccccacaaacggggcttaagacaacagaaatgggccggacgcgacggcgcacacctgtcatcccagcactttgggaggcgcaggcgggcggatcacctgaggtcaggagttcaagaccagcctggccaacagggtgaaaccccatctctactgaaaatacaaacaaaattagctgagcatggtggcgggcgcctgtagtcccagctactcaggaggctgaggcaggagaatcgcttgaacccgggaggcggaggttgcggtgagccgagatcgcgccacggcactccagcctcagcaacaagagggaaactctgtctcaaaaaaaaaaaaagaccatagaaatgcttcctcacacaggcctgagggccggaagcccgtcccctctggaggcagcaggggaaggcccgtcctgcctctcccagtgctggtggtggccggggctccctgacatccttggcccgtggccgcatcgctcgtctctgcccctctcatcctgtcccgcgtccttctctctgtgccctcactcagcttctcataaagacggcagtcaccgggtcagggtgacctgaatccaacgtgaccttgtttaatgacacctgcagagagcctgttccacagaaggcctcattttggggttccaggttggcatgaatttcggtgaaataacaatgacctggacccatgacaaagtcactgagctgctgaattaaccaaccccagagccgccgaccccgggttcttctcgcaggagacaatcaaggtccctttggcgcccagcagctccgagtcaggtctgtggtgacagccctaaaggcatcgcgagtgccatgacccagggaagggctctcgggcagctctttgacctgctgtgcctcagctgcctcatctataaaatgggtggaagccgcagggttgtggggagaatggaacccagggctcctcggaactcagcaccgcgcaggactcggcgtgagcctcggcgccggaggtactgcatttgcaccgatgctgcccacggcgctcggacgcggggcccacgccgctgattatccggcgtccaacttctctcccacacaccgggatcgctgcaggattctggggggttctgcgatgccggctgagtcgcccggcccatccactccctcttgctgctatcaccaatcaccacaaattgagtggctccaaacaacgcgagctaatccgcttatgtctagagctcagaagtctaaaatcaaggtgtgggcagagttggttcccaatctgctccgcctttcccagcgtcctgaggggcccacatcccttggctgggggccccttcctcccggttagcagccacagcgcagcctcttccggtctctctctgactctcaccccctgctgcgaggacaccgggcccccaaatcatcccatctcagggttgctcactcggtcccacctgcaggtcccctgtcgccgtgtgaggggcaccttcacagaatccgagggtggatgtggacacggggccgttgctgtgccccacacaggtgcgtgcgtgacgagtgccctcagaatgttctctccggctcccgcaggaggaccctcagccccgggttctggtcctgcttttcactgcgtaacctcagacacagctcggcctctctgtgcctcagtttccctcagtgcacagggtccctccagtgtggaagagccctgcgggcctgagccgccggccgcagcccccgggtgatggggcttggctattcccctccttaactcaagcttccctgtgaccaggagggaccggctgtccctgtgcctgctgtgatgtaggtgctgggagacggggctcctgggggacagcgctgggggctgaggccggtcaggctccctgggggccagggcccctggtccatcagcaactcctccgggctccaacacaggctcattgtccacttctcccctcacctaggtcccctggcctgggccaccgccgtccctcgcagcctcctcccgggtctctgctgcccttccagaccctcctcctccctcagcaacacttccacacggcccctggaagggctttcaaaactgcacactctgcgccaccccctacttaaaaccacccccactcctcaccacagcccacagagagagtcccgctccctctccatcagctccagtctcatggctctccttgccgtgacgcacacgcaccaggtccgctccctgcgtggggcctttgcacctgctgtgccccccctagaactctgtctgcaaactccaccgcgtcaggcctttgcacctgcacctgctgtgccccgtctagaactctgtctgcaatccccaccacgtggggcctttgcacctgctgtgcccctgcctggaactctgtctgcaatccccaccacgtggggcctttgcacctgctgtgcccctgcctagaactctgtctgtaaacccactgcgtggggcctttgcacctgctgtgccccgcccctagaactctgtctgtaaactccacagtcaggcctttgcacctgcagctgctgtgccccgcctagaactctgtctgtaaacccaccgcgtggggcctttgcacctgctgtgccccgcctagaactctgtctgcaaaccccaccacatcaggcctttgcacctgcacctgctgtgccccgactagaactctgtctgcaaaccccaccacatcaggcctttgcaccagcacctgctgtgccccgactagaactctgtctgcaaaccccaccacatcaggcctttgcacctgcacctgctgtgccccgactagaactctgtctgcaaaccccaccacatcaggcctttgcacctgcacctgctgtaccccccctagatctctgtctgcaaacccaccatatcaggcctttgcacctgcacctgctgtgccccgtctagaactatgtctgcaaaccccacggccggggtttccatggctcaggtctcagcttcaaggtcgcctcctgggaggggcagccgcccagcctcctgctctaatatcacacgattttagctctgcagagccgctaccagaacctatttcctcatctgtttgtcctcttctgattgactgtctctcctactggaatccaagctccttgagagcaggaacgaggtctctcattgtctactcatcatctgtgccgggcaggggaagcgtatgctaaatatttcctgcagtgacggaaagcagcagttatcccccaacatccggagccccaacaaccctggcgtctgaattctgaacattctaaatcccacatccacggccaatggccacacctgactggtcccaatggatgtggtgtgaaggaagcgcacgcgtcctccgtggaacacgccggccgtcggcgttaaacttgtaggacaaaccgccgggagacggcgagggcggcccgatgccaccagggaaaacagacccaaccaggcctggcatccgcacagacccgggggaggcggaagtgggtcccggggaggcggaagcgggtcctggggaggcggaagccggtcccggggaggcagaagagggtcttggggaggcggaagtaggttccggggaggcggaagcgggtcttggggaggcggaagcgggtcttggggaggcggaagtgggtcccggggaggcagaagcgggtcttggggaggcggaagtgggttccggggagacggaagcgggttccggggaggcagacgcatgttccgggggacggggaagtgggttccggggaggcagacgcgggttccggcggagggggaagtgggttccggggaggcggaagcgggtcttggggaggcggaagtgggtcccggggaggcggaagcgggtcttggggaggcggaagcgggttccggggagacagaagcgggttccggggaggcggaagcgggtcccggggaggcggaatcgggttccggggaggcggaagcgggtcctggggaggcagaagcgggtcttggggaggcggaagtgggttccggggaggcagacgcatgttccgggggacggggaagcaggttccggggaggcggaagcgggtcctggggaggcggattcgggttccggggaggtggaagcgggtcctggggaggcggaagcgggttccgggggacggggaagtgggttccagggaggcggacgcgggttccggggaggcggaagccggtcttggggaggcggaagtgggttccgggggagggggaagcgggttccggggaggcggaagcgggtcttggggaggcggaagtgggttccggggaggcggaagcgggtcccggggaggcggaggcgggttccggggaggcggaagcgggtcctggggaggcggaagcgggtcttggggaggcggaagagggttccggggaggcggaagcgggtcctggggaggcagaagccggttgtactgcgcaggccgagcgcgcctggggaccacacgtgggggagtgaggtttcacagccagcttctgggggctcccacaggctttggtgggcccgggcttgaggcccccacctctgcctgtctcctaacggcccgctcctctgtgcatctgagtctaaagttccttctccttacagagacccctgatccaggtaggcctcatcttgactaggttacatctgcaaggaccctgttcccaatataaggtaataaggtcagactcctacggcacaggaattgtagggggacccttctcaactcggtgtagggggaaggaccccactgaacccagcgtagggggaaggaccccactgaacccagcgtagggggaaggacccctctcaactcggtgtagggggaaggaccccactgaagccagcgtagggggaaggaccccactgaacccagcgtagggggaaggaccccactgaagccagcgtagggggaaggaccccactgaagccagcgtagggggaaggaccccactgaacccagcgtagggggaaggaccccactgaacccagcgtagggggaaggacccctctcaactcagcgtagggggaaggaccccactgaacccagcgtagggggaaggacccttctcaactcagtgtagagggaaggaccctactgaactcagcgtagggggaaggaccccactgaactcagcgtagggggaaggaccccactgaactcagtgtaaggggaaggacccttctcaactcagtgtagagggaaggaccctactgaactcagtgtccagaaaagcaaagacacaacccaatgtgaacacaggctaatgttcctggccgcagaggccgggaggagctgggagcacccaccggtagtggcgtgcgggagtggctgatcattttcccagacgccgtaatgactgcagctgtaggacagctgctctctcagaagacgggggactatgcacggcgctgtcacccctgcaggtgacttcacacggtttactataaaccacagagaggggcagacccgtcagcagaggggaaggttaccctcctaggtggaggcgtgctgtgtccaggcgcccgacttccccgtgtgtttgaaaaggttcatttatcataagacccaaggtaaataaacaaaggccgcttccttggccgccctggaagtccctgctgcctcccatctggaatcctggggtctgtccgggcgccagcccctttccaaacaccccttcccgcacccccaccgcaggccagcgtctcgggccccgtctgtcattcgtgaacagctgtccggggggctccggtggcagagacgccccggccgctcgccgctctcggcctcgcccgcccagtccgagtggggggcggtgcacctgcgcatgcgcgcccctcccccgccgccctctccccgcccctccccacgtgacgccgtgggaacccggaccccagcgcctccgggtgggggcagccgccggccgccggccggggatgggggtccggggtggcgggagagcaggaaggatggggaggggacacctggctcgcggggtccgggggtcccggaggagagggtgggggaggggaggccgccgcgaacgggctcccggggggggtgggggggactcacccgcacgacgtaggagaccccgggccccaggaccctggcgtcggggtgtagccagccgtgcgcgggtttgtggatgaagctgcccttccggatccactcggcggcggcggcggcgtccccggaccccgccgccccccgcccgccccgcgacccccgcgaccccgcgccccgacagcggctgagcgcgggcaggggacagggcgcggcgcagcggggctcgcaggcgcccaggacggcggccgccagcgccgggacgccccccgggcccgccggctcgggttgggggtccgcgccccccgaggccccagccgcccgcgccgccgccgggccgcggcccaggaagccgcccggggccgcgaacttccactgcggcattcggggcagcaacgcgcagaaggtggtgggcgcctcgggctcggggggcgcggggggcgccgggggcgcgcgcccgcccggaccctgcgtcatggccgcggccgcccgacggagcccgaccgggcgctgcgcctggcgcggaggaagccctcccgctccgcccgctccctcccgccccccggcccggtgatgtcatccgcccggcccagcgcgcagccgcggggggctgcgcccctgggaccccggccctcctcgtcccggagcctggccgcgaggctggggaaactgaggccctccgaggacaccgggcgctggcctggaacccgcagccaaggcgggacggggctttgaacccagaaccccgtcagcgaccctccccgctgcgccccccacccccgcccgccgcccaagttcgcagaaggaccgagctggagaagcttagaaattccacatcccttctttcccctatttcctagtggggaaactgaggccccgggaggcgcggccagggaaaagagaaccccagaccctaaggtcagcccctccctctccgttgttgcagctagaaggtaccttagggtcacccctatttcttagtggggaaactgaggcgcggggaggggaaggggcgcggccgagggctcacagacgaagctcaaacccaggagtgccggctcgggggtggggggggggggcggggctaggagcggagccgggcccctgctctgcggcctgtcccggcctcagtttctccggctgtaactcaggggagcgggctggagggtcgcggcccttcttccctcacttctggggagcccagtcccgcaccagctcatctgagctctgggcctcagcctcccaggccggtcgctccatccccagcctcaacctctccgagaccggccgcaccttccctggcctcaagggtcggttccttctgcaccagaaaacggggtgtcactgtcaccccgggacccagcctcctggcccgacttggctggagctcccctgcacctgccccgccccaagcagggctgattgccgggaacaaagggaggggccgggacgcgctggcaggtggggagggagggaggggcgaggctgcccggagcccgatcgataattcaggggatgagatcacagccggcgccgcccgcggggccggggaggtgggggaggggagcgaggcgcgcggtcgcgatcggccgtctctgccgcggcgcgtgtcggactcagcccctgcgcgtccgcgggaggagcagatcgtgggcgcgattggtcgggctggagccgcggctggacctgcgcgcggtgtgtgtgttgtgcgcagggtgtacgctgtgtctgggtgcgtgtccaggcatatgcaggggatccaggctgctgggtcctggggtgtgttcacctaatgggtaaagggtgggacaggtttggcggccctaggctgagggctgtgggctgaggagagagcagccccaccaccccctctctgcgccctgcatgcctcccaggctgcatccctcagggaggtcccggggcagtgtcgcaccctcccaagctccgggattagggtctttctggatgggaggtttgtaaggtggtccaggtgccatccctccctggcacacagagggctcagtcacacggcacccccggtgtgtttccttcctgtcccttggagacagtggcaggaactcagtccaacatccagagttcaaatcctgacatcagactgaggtgggggctcacagcatgccccaggacaaatgtccagtctctccaaagcaccatttcctctcagtagatgcccctggtcctgagttgctatgaagcctagatgatctttattaatatccaaaacatagcaagcagctactgatggcagatattagaatacctcaagctcctatacatccttcaaaacccagcttcaatattgcctcttccaggaagcctacctggctgcctgctcaaaagcttggctccacctccggcctcccctcgccctgggtctctcttctggtctctcagaccccctggccactggagggctacgggtctggctctggagggcggcgttcgggtctcttttctgtgacatcaatagacacgttaaggccgggctcggtggctcatgcctgtaatcccagcactttgggaggccaaggcaggaggatcacaaggtcagaagatcgagaccatcctggctaacatggtgaaaccccatctctactaaaaatacaaaaaattagccaggcgtggtggcgggcgcctgtagtcccagctactcgggaggctgaggcaggagaatggcgtgaacccgggaggcggagcttgcagtgagccgagatcgcgccactgcacttcagtctgggcgggagtgcgagactccgtctcaaaaaaaaaaaaaaaaaaaagacacattaaatgagtaagcacatgtgatgctgacagctctccagcccaggaaaggtttattggctaagcaactgtagaaggtggagtgggaaaggcacaggcctcggggctgcctccagcctgagtttgggctgggaccggggctaacccaagctgtgatggggatccaggccctagtggagctggacgccgagttctgggacacaggaagctccatctccagccagctactggggagggccggaaggtgtccctttccccacctggcctggcctggcctggcgtgacctggaagaaactggggcactggaaggagactcaccctgcaccctgcacagggccatgggtcacagcccccagggactggaaggatcaggtgtcctagaaggacctggacagttcaggaaaggggagggaagactcctttcccagcccctctcgccttctagcccctccagccaaagccaggccccaggagaggcccgccagccccccgttcactgtgtgggaaacaggcctggcctagcagcagcggccgggcagcctgtgccccgcaggccgggagggcgtggtggcggccatggtgctggcccgtttcgagtggcggatgcccatagagaacgctggagccctggctttgttcacggtgacctgctctgggcagtgggcgccagggccgggggtctcctccaggggtcgcggggcccggggccgccccagcatggtgaaggcaggcaggcgctggcggtaggtgtttgcgtccgggctgtcgtactggcccgggcctggtatctcagcaggatcctgcggggggcgggcggggggggtgcggcccaccaccgtgtagctggggctgctgggcttggtgaagatctgtgagccccacagagggggcatggtgtaggcattaggggcaggggctgaggtgtccaggggcttcagggggaggcggcagcccagggtgaaagccggcggtgtccgatggcgcacagggggcaccttctctgggctgtaggccccagggcctggcgtcacctccggacctgagagagtggggaaggaaaggtggcactgatgtcctcacctgcccagagacccggcctggctccccatggcccacatgcaccctggagcttacaacgcttctcaagcagcctgggtgcctttctctcccttccccatcctccatacacatggtctgtgtttcaagcctccaggactttgcccaagctggacccagggccaagcacgccttcattttccacccctcctccctgctgccttccccagcccatccagggtagagccctcacagcccttccagagccccacagcctgggttttcccctctctccagacgtgagcacactgaggtgggatggtctgcacctgcatctaactgccccaccagactgggatcccataaaaaggaaggcatgtcaaatttactccaactctccagcagttgactgtctgagttgatgggtgaacaggataggtaggaggtgagtggttgagcggggagtgaatggttcatgaagggatttgtaaatggatggatgagtggatgatggatggatggatggatggatggatggatggatggatggaacggttgataggtagaaggaaaaaaggaaggattcatagatgagtgggtaggtgggtggctgaatgggtgggagggtgggcggatggatggatggatgagtgagtggatgggtggatagatgatggatggatggatgggtgggtggaaggatggataggtggatgggtgagtgggtggatggatggatgggttgatgagtggatggatggatgggtgggtgggtggatggctgggtgggtagatgctaggtgggtcaatggatgagtggatggatgggtggatagaatgttgggtggatggtggaaggaggggcgggtggatgggtggatggatggatggatggatggatgatgagtgggtggatgggggatggatggatgtgtagatggatggatggatgagtgagtggatggatgaatgggtaggtggatgggtggatggatgggtatgtggttggatgggcgggtggatgggtgtgtggattgatgggtaggtgagtagatggttggatggatgagtgggtgggtggatagatgggtgggtgggtggatgggtgagtggatgggtgaatggttggctggatgggtgagtggatagatgggtaggtgggtggatggatagatggatgagtggataggtagatgggcaggcaggtgggtgggtggatgggtgcaggtcggtgtgtggatgggtgtgtggatggatgggtgggtggagggatgagtgggtgggtagatggatgggcagatagatggttgtgtgggtgggtgggtggatagatgaatgagtgggtaggtgaaaggatggacagatggatgggtaggtggatagatgggtgggtgggtggatagctggacagatgggtaggtgggtggatggatgagtgggtgggtggatggtggatggatgtgtggatagatggatggatgggtgggtggatgggtgggtggatgggcgggtggatggatgggtggatagatggatgagtggatgggtggatggttgggtgggtggatgctaggtgggtggatggatgagtggattgatggatggatagatggttgggtggatgctggaaggacgggtggatagatggatgggtgggtggatgggtgggtggatggatgagtagatggaagggtggatagatggttgggtgcagggtggatgtatgggtgaatagatgggtgggtgggtggatggatgagtgaatggatgggtggatacatggttaggtagatggtagatggatgggtggatagatggatgggtgggtgggcgggtgggtggatggatgagtggatggatgggtggatacatggttaggtagatggtggatggatgggtgggtgggtggatggatgagtggatggatgggtggatagatggttgggtggagggtggatggatgagtggatagatgggtgggtgggtgggtgggtggatggatgagtgaatggatgggtggatacaaggttaggtagatggtggatggatgggtggatagatggctggatgggtgggtgggtggatggatgagtgaatggatgggtggatacatggttaggtagatggtggatggatgggtggatagatggatgagttggtgggtggatggttgggagggtggatgctaggtgggtggatagatgagtggattgaaggatggatagatgtttgggtggatggtagaagcatgggtggatagatggaggggtgggtgggtaggtgggtggatggatgagtggatggacgggtggatagatggttgggtggagggtggatggatgggtggatagatggatgagtggatgggtggatggttgggtgggtggatggatgagtggattgatggatgggtagatggttgggtggatggtggaaggatgggtggatagatggatgggtgggtgggtgggtgggtggatggatgagtggatggacgggtggatagatggctgggtggagggtggatggacgggtggatagatggttgggtggagggtggatgggcgggtggatagatggatgggtgggtggttgggtgggtgggtagatggatgagtgtatggacgggtggatagatggttgggtggagggtggaaggatgggtggatagatggatgggtgggtgggtgggtggatggatgagtggatggacgggtggatagatagttgggtggagggtggatgggcgggtggatagatggatgggtgggtggttgggtgggtgggtggatggatgaatggatggacgggtggaaagatggttggtggagggtggatggacgggtgggtagatggttgggtggagggtggatggatagatggtgggtgagtgggcaggtggatgggagaatggagtcaggcaggtgtgtcaggtgtgcgggcaaactgttgggtgcctgtgaaggatactgccgatttgccacagtccccattcacctctcacctcctgacacctaggccagctgcctctgtggccatgtgtgcccagggcctctgtcatcctgacccacttcactcattcagttctcccagccccagtgggcactgcagtggcggcccctcctccgtgtcccttggatttgatcactccaaagactctgcattctaagaactccaaggataagagggggagggaggacagggcaggagagtcgctgagaccctggaaagcaggtccttgtgcggctgcttggctccagtactcaccccgagacttggcccggccctgcatggagtaggcaggggtgcagctgcggccaaagcgtgtgactttggggtccaagaagtagatggggcccgggctggtgtcctgaggtggtgctggggagaggagcccagagtgctgagagtgattctgaagacagtgcctgccccaccgcccggcctcagtgcccctcttggccccgagacactcccaccaggtcagaggccaccccagtcccatctcggaggggtcaccccaggggccctgagttgtggctgcctgaactgggtgcctcaggtctctgctctgactctgtctcctcacagtcaaagtgattctgctctgctgctgtttgtagccacctctgcccctctaacctctgcgcaggtgtgggctggagaaccagctcgtgggtttgttggaactggacataattaggctgggtgtggtggtgcacacctgtaatcccagcactttcagaggccgaggcaggagggtcacttgagctcaggactttgagaccagcatgggcaacacagcaagatcccgtctctactaaaaatttaaaacttagccagacatgttgacatgcacctggggtcccagctcctcggaatgct[131 bp omitted]caagagcgactaggctctgaaccagggcttcggcttgctggcaggtcgcatgcttaagaggggggctcggcgttggaccacgttcaaatccagcagggcctcttgtgagctggtgaccttggccaagttatttatcctaagcctattttcctcatcagcatgttgagaaaatcaaaaagtgagaggatccacagaagggagtgatcctgtggccttgcacttcccgattgagaccgtttgctgctttcaccattattgccacgccaaagcacaaccagtgacagatgcgcaggcacctgtgtgtagcagcgtgaccggtgttcacggccccacagaccgtctgtgcacacatgctgtacatgtggcagtgagccacgggtgagggaggaaacgtcatccacaccttcgccctcccctgaggagtccgtggcacgcagtgtggcccagacacggctccagacctccccgaaacatcatccaaacctttgccctcccctgaggagtccgtggcacgcagcgtggcccagacacggctccagacctccccgaaacgtcatccaaacctttgccctcccctgaggagtccgtggcacgcagtgtggcccagacacggctccagacctccccgccacaggcacaagtacttgcacatacgctgtggtccccaacgcaggctcactggccagactccaagggtgatcactgacccttagccacagcctcatcctttgttagactggcaggagggagggggtctatttttagccccttccccaggccctgggcaaatacagtcccccaggactggaagaggctggggagattcttttttttttttttgagggagtgtctcactctatcgcccaggctggagagtgcagtggctcatggctcactgcagcctcgacctcctgggctcaagcaatcctcccacctcagcctcctaactctgggaccacaggcatgcaccaccatgccctgctaattttttattagaaacccttgatcatggctgggtgcggtggctcacgcctgtcatcccagcactttgggaggctgaggcgggtggatcacctgaggtcacgagttcgagaccagcctggccaatatggtgaaaccctgtctctactaaaaatacaaaaattagccgggcgtggtggcgggcgcctgtagtcccagctactcaggaggctgaggcaggagaatcacttgaaccccgggaggcagaggttgccgtgagccgagatcgcaccactgcactccagcctgggcgatagtgtgagactcagtctcaaaaagaaaaagaaaaagaaaaagaaatccctggtcataatcccatcgcccctccacagatgcctgggcctcactcacgtgaccacagactcgcctcaaagtgctcactgtgcagggcttagccatcaggactccccatgctgaagcactgaccttggcctctaccctgcacctggaaccttccagccttttcttctgccctccccaacccctggctcagtgccccgtgagaaatgaacacaccccagctcatcatgacatcactcatctcaaggcctcagcctacaaacaggctctgcctggagttcagttcttctgggggctccaccaaactcctattcatcctacaaaacccagatcccatgttccacttccaagaagcctaccctgggccttcagcaaagtgtgcacgatccccagtccaccagcctccccacgctgtctcgggcccaggaggtgtcctgagactggatttgaacctgggaactcagatcggtctgggtcataggctaagttctttttttttttttttttgcgacggagtctcgctctctcacccaggctggagtgcagtggcacagtctcagctcactgcaagctccgcctcccgggttcatgccattctcctgcctcagcctccctagtagctgggactataggcgcccgccaccacgc[187 bp omitted]tgacgccttcactggcattctgggaccccttgcagcttcctgagtcccagtgtgggctgggatttttgctcattctgaaggctgagaacaggctgctgtcctgcccctcctccagccgcccctcccagcaggcctctgtccaaatccccacacaagacccttccgaccgcgctcccagcccagctgggaccttggagcagcggtagaaaatggagggatggaatttgggagccctgagacctgctggcccgtggtagcagcgccactgatgaacaccaacagctccctgggtgccgggcggggtccacgccggagctgcttcactgcgcccgttctagacaggagcaggcaccatggggcaaggccaccagcctgtggcacagcgagccggtgcaccccatgcctgccctcccgcaggcagccgggaatgtccacagagatacaccacagccctgtgagacgggccaggcccggggagcccccaccttcatggtggagaaactggggctcagggctcagcctcacacccgacagcacacgtttactgagcacttactattttttcttttt[132 bp omitted]tctcctgcctc[211 bp omitted]ctgtcgcccaggctggagtgcagtggtgcaatcatagctcactgcagccccgacctcctgggttcaagtgatcctcctgcctgggcctccccagcagctgggaccacaggcacacactaccacacccagcttttcggctacttttaaaagcatttaatcctcacttaatgaatctcaaaaaggcatctaatccttacaacaggcctgtatggagtctgttattatttttaatataatgttaatgtttt[131 bp omitted]cctcagcctcccgagtagctgggactacaggcgcccgccaccacgcccggctaatttttctttggtatttttagtagagatggggtttcactgcgttagccaggatggtcccaatctcctgacctcgtgatccgcctgcctcagcctccttaagtgctgggatttcaggcgtgagccaccgcaccggcctgctattgttaacttttaacagaaactgagttgcaaagcacttaagcaatttgcctgagtccaggcagcaaggaattgcaaacacggtaaggcaggtacaggtactcacctccttactgcgctctttctccttccattctcattatcaatgaaaaaacagagagggacagcagcttgcctgaggtctcacagtaagtaggaggtggagcaggttgtacagcccagccctgcctgcttcctgccgcactaactgggggcctggatctaaggggtaaggagacccatcagtgctcctggggggagattggaggatcagggaagcctccagccgcccactcgcccgccttaccctcactgggcctccggacgagcgagtaggcgggactggccaccctggtgcagtcgtggttgatgaagcccacggtggacggcaggacatacaagcctggccccgagcctgcagcccaaagccctcaggtcacctcctgggcccagattccccgaagaaggagccctggacccagctcctgagccttagcctgggttcccctctccctccatggtgaggattgggggccccggggagcaagaggctgctgcccgtcggggacaaaatgtgatgcctgcattgtgagtcagacatgaatcacagaggaaaagctggggacagcagcccccctcaccctggggcacagacagggagactggggcctgagcctcccagagatacacggtcacaggtggggaaactgaggcctgagcctcccagagatacacggtcacagatggggagactgaggcccaggcagagatacacggtcacagatggggaaactgaggcccaggcagagatacacggtcacagatggggaaactgaggcctaggcagagatacatggtcacagatggggagactgaggcccaggcagagatacatggtcacagatggggaaactgaggcccaggcagagatacatggtcacagatggggaaactgaggcccaggcagagatacacggtcacagatggggagactgaggcccaggcagagatacacggtcacagatcgggaaactgaggcctgagcctcccagagatacacggtcacagatggggagactgaggcctgagcctcccagagatacacggtcacagatggggagactgaggcctaggcagagatacatggtcacagatggggagactgaggcctgagcctcccagagatacacggtcacagatggggaaactgaggcctaggcagagatacatggtcacagatggggagactgaggcccaggcagagatacatggtcacagatggggaaactgaggcccaggcagagatacacggtcacaggtggggaaactgaggcccaggcagagatacacgatcacagatggggagactgaggcctgagcctcccagagatacacggtcacagatggggaaactgagggccaggcagagaaacacggtcacagatggggagactgaggcccaggcagagatacacggtcacagatcgggaaactgaggcccaggcagagatacacagtcacagatggggagactgaggcctgagcctcccagagatacacggtcacagatggggagactgaggcccaggcagagatacatggtcacagatggggaaactgaggcccaggcagagatacacgatcacagatggggagactgaggcccaggcagagatacacgatcacagatggggagactgaggcctgagcctcccagagatacacggtcacagatggggaaactgagggccaggcagagatacacggtcacagatggggagactgaggcccaggcagagatacacggtcacagatggggaaactgaggcccaggcagagatacacggtcacagatggggaaactgaggcccaggcagagatacacggtcacagatggggaaactgaggcccaggcagagatacacgatcacagatggggagactgaggcctgagcctcccagagatacacggtcacagacgccatgtgttgtggcttctgcagaatctcgatgccacagggatcaggagagaccacagaaccagcccgaggacctggcttggggcctgactccagccgctaattgtgggtgaggaaactgcggcccgtcctgggccctcaccgaggccagcagctgatgtggctcccagcagagccgcctccgcacacgcgcccctcgccctgccccacgttgtctagggcgcccgtccctgagggccacgctggaaatattccctcctccccgcgtctcccgcatgatcgctgtggctttgcccactgctgtacccacagcccctggaaggggacccggctggcaaagcacgcagcttccgttggacagacacatactcggggctcacggcaaccccgtgtccacacccatcctgccggaaggaaaactgaggtctggggaagggcaaggacttgcctgaaactcctgcctcctgctgggctcccagaacattccagaagccccagaagtatggggagtggagcaggaaaaggtcccacccatcccccacggctggcacgcaccgttctccagggtggccgtcccacaggacttcctcaggccggtctccggaatctggccctccgtcactcgccggccaaggggggctgtggccagccgtggggtggagtcgcagctgagggtccccatggtgggcaggcgatggcccccacagcacccacggggcctggtgctaccttctgagccgcagcagctctggcggccacaggcccaggcaccgtccccaccttcacggcctcaccacaccctcccacgaccacagccgcacagacggcctcttgtcccgcagcagggagtcgtggggccctggcccaaggcaggctggtcggccggacactggcctggaagtggggccgggatcgagtgtcggccaggcggctggatggtccaggaaagagtccggtgtcagcagagtgcgtctcccgggagccggcagagctgggcagctggggccagggccggccccagggaactagacctgcaaacatgacacccacagccttgcagcaggagggcctggcggggtcgtgggtggcgtggccccgtttctacacctggggaaactgaggcacagcccaaggtcatacagcaagtacacaactctgggagtttcagctctgagccaagaagcattcactgcctcatcctgtcactcattcctgccaaagcatgtactgggcacctactgtgtaccagcctctgttgggggtggtgagaactggacacgaacagacggaaaagaaggagatgttctcaggatgggagagagaaagtcgtcagtaaatgtgataagtgaacacagtctggtgtatgaggaggcactgaacgtgagggaaaacgcagacaggtttggggcccagggtagcagtgtgggtgtgggtgagccccacggagaaggtaaaactgaacagtcccaaagcaggtgaggaggcagccgtgcagaggccctggggcagcggcgaggacagcggggaggtgagagccgtcctcactgcctcccagatgcctccgagatttaaaccacaatggattttgatacattcaaggcgaccactgcgtgaggctccaagaagaggctcagaaaactgccagatgagatgcacgttcctgtctcttccttgtttgtttctgtattttttggagccttttgcagtgtaatttttttttttttttgagacagagtctcactctgtcacccagcctggagtgcgctggtgcgatctcggctcactgcaacctctgcctcccgggtttatgcgattatcctgcctcagcctcctgagtagctgagattacaggcacccgccaccacgcctgactaat[137 bp omitted]acctccgcctccagggttcaagaaattctcctgcctcagcctctcgagtagctgggattacaggcatgcaccaccacgtctagctaatttt[137 bp omitted]cctcccaaagtgccaggattacaggtgtgagccaccgcgcccagccaatttttttgtatttttagtagagatggggtttctccatgttggccaggctggtttcaaactcctgacctcaggtgatccacacacctcggcctcccaaagtgctgggattacaagcgtaagccaccgtgcctggcctgcagtgtcatctttaacagctttattgatataattcacataccatacaattatacatttcaccctgcaatgtaattttaatgtattgcatgttttaaaattttttaatcaaaatggtatagtctacataaaggatcataaaacaagtcttagtacatatcaaacttttgaaacttacagagcatattatctggtgaaaaaggaattaaaatagaaatcaccaacaatacgatatccaggatcccccaaatatatttagaagttaaacaacatacttctgaataacccacgcatcaaagaagtcatcacaaaggaagttagaaaattttcaaactaaatgactataaaaaatcaacatattaaactgtgtaggatgcagttaaagaagtacttagagggaaaatggttgctttaaatttttatatgagaaaagaaggctgggcacagcggctcacacctgtaatccctgcactttgggaagccaaggcaagcagattgcttcagctcaggagttcaagaccagcccaggcaacatggtgaaaccccatctctacaaaaaatacaaaaatcagccaggagtggtggtgtgtgcctgtaatcccagctactcaggaggctgaggtgagaggattgcttgagcctaaggaggccaaggctgcagtgagccaagattgtgccactgcactccagcctaggcctaagtttccacctaagaagctaggaaaacaagagtaagtataaggaagattgtaaagataacagtagaaatccatgaaattgaaaactgtagaaataatcccttggccgggcactgtggctcatgcctgtaatcccagcactctgggaggccgaggcgggcggatcacttgagatcaggagttcgagaccagcctggccaccatggtgaaaccccgtctctattaaaaataaaaaaattagctgggcacagtggtgcacgtctgtaatcccagccacacaggaggttgaggcaggagactcgcttgaacccgcttgaaccctggaggtggaggttgcaccactgagccaggatcacaccgctgcactccagcctgagtgacagagcgagactccacgtcaaaatcaaaaaaaagagaaaaaaagaacgcctcctccccatcccaaaaaa[137 bp omitted]tgcctcagcctcccgggtagctgggactgcagacacgcgccacgccacggcacgcaggccctgcacggcctcgtctccacctccccctgtcctctcgtcctgctccttcccctttgccgctctactctgaccatccggacctgctttccctccctcgagcccctaagacggtctccacctcggcctctgcctgagctctctctacctgagatgcctctgccagcaaaccaaccctcgctggccccttcctcggtcacgagggcccccagcccacaggccctgtcactgcccaaccttggacacaccatttgctcgtttccagaggcagcacaactccagagccacagcagggatgggtgccgaggagggagagaggaggaaaggccccaacctccctcgaccaaagctgctccttcaccaaaaccagccgaagtgcaggaccccaggggctcccacggctaaagagacagaggggacaagggcctggaaggtgttcccccaaccccatccctcctcacatccgggtcaccaggtccaggccacaccagacagccactaaaggcagacagccagagacttggttccagcccggactcggccccacctgcctccgtttccccattttacgtggggtggaaccaaaagctaacacagggaagacaggatgggaagccggccaagccgacagcatgttgctgggaggacgctgagggccggcagcctcgccagaacgagctggggcccctccagccaccagtccccttctgatctgatcgcaccagattctatcaactctgtcttcagctcagagcttgtcgcaactgccaagcaaagagcttgcaaatgagatgcaaatgaattcaacacacatgcagatgagccctgattttaatcctgcctgctcgacagaagagactaaatcacaacagtgaaaaaaagggaggctggaccggatgagaggccggaggccggccctacgtccacccgcccagctgccggctgcaggcgagggacgtcactgcccggcctgggtgtcctgggtgggaggtgactccgttggtgctcccgagacccttgttctcaccgtaattaggaactcagccagtgtttatttggggccaggccctgctcaggtgctgggaaaacgggagaggacaaaacacacaagttcctcgtcctccctttcccttggagacaggcaggcagataagtgaaacttacgtgagtgcagagggcacgtcgcgctatggaggaaacgtgggcgaagggggtgttggaggccgaaagagtgagggccgtgatcaactcagtataccactggggggctatatgagtagacagcaaactgttctcgtaaatgcagaatgttggcaaactgacaaactgcgtctgccgtgcagaagggctgctgagggccatcaccacccaggcacaaatgtttcctacgattaggcataattgaagcccgtcagtaacaatatgaacctgtgatcaattaagcagctgctcaatcgttacctcctcctctctgctcttgttacccaataaatactaagggctgtagaagctcaggaagctgcctttgctcactaggagcagggagcccttttcttcttctttttctctttttttttttttgggggggggggggatggagtttcacccttgtcgcccaggctggagtgcagtggcgccatctcagctcactgcaacctctgtctcccaggttcaagtgatcctcctgcctcagcctctcgcgtagctgggattacaggcgtgcgcaaccacgcccggctaatttttgtatttttagtagagacggggtt[144 bp omitted]gccaggctggtctcgatctcctgaccttgtgatccgcctgcctcggcctcccaaagtgctgggatgacaggcgtgagccaccatgcccggccccttcttctctctttccttctctcttcttcttccccacgttgcccttcctttaaaatagttacttttaagtttttatttctatttaaaagtttcctttgtttcttgttatcattttctacgtttgtcccttcgttcagtcttataatgacggtctcaggcagtaactgtggcggtcagccacagggtggttggtggtgtgagcgtctgcgatgtgaactgggaggtcgggagcctcgcggagaaggtcacgctccagcagagaccagaggagaagccgaactcgggaggcgggcgaggcattccaggctgacaggaactgcacgcacagaggccctggggcaggacctgcctggtgtgtaggagaaacagcgacgaggcccgtgcagctggagcagcgtgagcaaggagaagaggagccgggaggaagccgatgcggcgggtcctgcacggcctgtggactgtggggacacgggtgacgtgtgagcagggacgcgtcccaatcagagctcacaagcgccctctggtgacatctgggagagcaaaacgtgggcggtgccgggagagggcgtcacatgctgggaaggatgatgaggatggatgacaggaaggatgataggggaggatgatgggaaggatgatggggaaggatgatggtaaggatgatggagaaggatgatggggaaggatgatggggaaggatgatggggaaggatgatggagaacgatgatggagaacgatgatggagaaggaatgtgggaaggtgatggggaaggatgatgggaaggatgatggggaaggatgatggtaaggatgatggagaaggatgatggagaaggatgatggagaacgatgatggagaacgatgatggagaaggaatgtgggaaggatgatgggaaggatgatggagaacgatgatggagaacgatgatggaaaacgatgatggagaatgatgatgcagaaggaatgtaggaaggatgatggggaaggatgatggaaaggatgatgggaaggatgatggagaacgatgatggaaaacgatgatggagaacgatgatggagaaggaatgtgggaaggatgatggggaaggatgatgggaaggatgatggagaaggaatgtgggaaggatgatggggaaggatgatggagaacgatgatggaaaacgatgacggagaatgatgatggagaaggaatgtgggaaggatgatggggaaggatgatggaaaggatgatgggaaggatgatggagaacgatgatggagaacgatgatggagaaggaatgtgggaaggatgatggggaaggatgatgggaaggatgatgggaaggatgatggagaaggaatgtgggaaggatgatggggaaggatgatgagaaggatgatggggaaggatgatgggaaggatgatgggaaggatgatgggaaaagatgatgggaaagtatgatgggaaggatgatgggaaggatgatggagaacgatgatggagaaggatgatggagaaggatgatgggaaggatgatggagaacgatgatggagaaggaatgtgggaaggatgatggggaaggatgatgggaaggatgatggagaaggatgatggggaaggatgatggggaaggatgatgggaaggatgatggggaaggatgatgggaaggatgatgggaaggatgatggggaaggatgatggggaaggatgatggaggatgatggagaaggatgatgggaaggatggtgggaaggatgatggagaaggatgatgggaaggacaatgggaggatgaccgagaaggatgattggaggatgatgggaaaggataatgggaaggatgatggcaaccaagaccaactcatcttcaccaagctcatggtgtagccagaaagttgatcacccacagcagcactgcccaccagaaacagactgagaacctcctactttttttttttttttttttttgagacaatatgttgctctatcacccaggctggagagtgcagtggtgcaatcatagctcactggagcctccaacttctgggctgaagtgatcttcccacttcagcctctggagtagctaggactataggcatgtgtcaccatccctggctaatttcttttttgtgtgtggagatgggatcttgctatgttgcccaggctggtctttaactcctggcctcaagcaatccccctgccttagtctcccaaagcactgggtttacaggcatgaaccaccatgctcggccatttttaaattttctagtagttgtatcaaaaaaagagaaacacgtgaaattaattttaataatacattttattaacccccatatccaaaataatatcatttctgcatatgaacattacaggtgagatatttcacattcttcttttaatgctgtcctcccagcctggcatgttttgcactctctgcctcagtgtggagcgtccacagttccagtgctccagcgtcacctgtgacctgtggacgctgtgtcgggcagcacaggtctagagagtagagcctaggactgatcccttgggccaatggtgctcagccatgggtgttgctgcccccaggggacacttggctatgtctggagacattcttggctgccaggaccaggagtgctgatgacatctagtgactggagaactacaacgctgttcctcccaagagaagaccctcaaatgtcaatggtgtcaagatggggaaatgctgccttagtggatgggcacttattaatcgcctactgcatacagggtgagatcggcagggcgtccttggcatacagcagattactcatgcagaacggctctgctgccagctctgtgctcacaggcgccaccccacgagctgttccatgcctatcaccatggacagaggcggaggtcacaaagccagcaggagtgtggacctaggactcaagtccagaatgttcttggccctgcactgtcctgcccacctacacctgccagtctgaatgtcacccaccctggccgccatcatacgagcaccccagccccgcccctcgacgggcaccgaggctattcccacttcacctcctttacaatttcctgcagtgaacttcccaggcagacctcctgcgcccatgaaccagggtttctggattagacactgtgtggtccctgatgaatcactgcaccactgtgcatgtgtttcctcctctgaaaaacgggcatatgtcagcctgactccacagggtcactctgaagacaagggcatctggccccttatcattcaaacatcctcttccagccttccctcactccagcaaatggcacctccagacccatgctgacttggatccaaacccctggggccgcttcctggatccaaagcccactcagcagctgactgctgctctccacctcacagccacggcccagtccagggccccatccccccccaacacccacccccacctcctcagggatccctgggacgcctctcccagccccaaaaggccactctatgtcagccagagccagctcttcagacatgaccatgggaagccctacagacgcccatcctggctgccactgcgtctagcacaggctcctccccgacagacctccacctgcctgagttccctcaccactcccccaggcatgcaggctcaccctcgttccagtgacacggagctatgagatcatggtgggctgaaatcaacagaccaggggttcccaacccaggtgattgcccccaggggacgctgggcagtgtccaaggacacctgtggtcgtcacgactgggggagctcctggcatggggtgagtgggggcagggatgccgctaggcaccctgcagtggccgggaccaccccacctgggatgtccacagggcctgcggaagaccctgcagcagagagccatcagctcttcctctcatgggtccccggaagctctgggatcaatcaatccccatggggccggctctgggatcaacactgtgtccccagctccccggaagcccctgcagccatcttccttccctctacctgtcagccgccatcctgcctgtaaagccaggccccgctttgcctcttctgtgcggcacgggaaggggacggtgcactcatgagacctcccaccctgcctgtgagatcagtcctggtgtgggtgacagctgtccatcactcacttctgttgctgggcaacgttccatcccatgaagatgccatgatttactcagagcttctaggctgcttctagctcggaacaaccgcaaataatgctgtgaacacatgtctctcttgttttatttatttttttcttttcttttctttttctttttttttttttttttttgagacagagtttcactcttgtcaccaggctgcagtgcaatggcgcgatcttggctcaccacaatctctgcctcccgggctcaagcgattctgctgcctcagcctcctgagtagctgggattacaggtgtgcgccaccacgcccggctaatttttgtatttttagtagagacggggtttctccatgttggtcaggctggtctcgaactcctgacctcaggtgatccgcccgccttggcctcctaaagtgctgggattacaggcatgagccaccgcgcctggcctcttgttttatttttgacacagggtctcattctgtgctcaggctggagtgtgcagtgacgtgatcacagaaaggaaacctcagagcagagttgggtcttcacatacggtggccaggaaggccccctgaagaggtgaaacgttagcaaaggcctggaggaagtcaggacctctaagggatgcccagctgtgcagacatctacggggtgtctggggagggcaccgctgtgcaaaggccctggggcaggaccgcacctggcgaggcggaggagcgaggaggaggccagggtggctgccgcagggtgaggaggggagagcaggaggagggagggcggggctgacccagcaggtcgtgaagggccctgaggacacggagaggacacagggttttaccctgagcagggtgggagccacggaggcctctgctggagcagaggagggcacggcctgaattgggtttgaaggaatcgactgagggtaggaaggtgggggtagggaagcccgggggaggcgagcacaccagcccaggtgggcaccacggggcctgggctgggggctgctgtgggatggtcaggagtgggtgggttctgggcctgtcttgaaggcagaactcacaagattttctgagacgctgtggggtgaaggggagtgagaggaggggagggtcctggaagggcgggtgcaacctcaacccagcggaggaccctgctgacctgcttagttgtttatggagggtcattgccgtgctctaccacgtaacacacgtacacacacacacacaggtgcacgtttacaccacgtgggtgcgcacgatgaggcacacacaggcaggcgcgcacacacacgcgtgctcacataggaacacgaagaggcaggagccgggcgtgcccgagccccgtggcgccctgggcatcccaaacaccgcctgcccagaacaggtgcgcagtgagtgcctgctgagccagtgagtggaatgaagctctacaatagtccagatgacagacatgactgctgtggctgctgccgatccaagtcccaccgttcttttctctagagacaaggtctcactccaccatccaggctggcgcgatcacagctcactgacggtggagaagggtgatcagagaatggtgggaatgaggcggccctgacctcctggggttagcgatcctcccacctcagccccctaaagcaccgggagggcaggtgtgagccacggtgccagccccaagttcccgacattctttcctaaaacacatcctccggctgcagatgagggtgcgacagctgggaggcagctcccaggaggccgggttcctccgatgacctgctgtttctgtgtccctggcacacggcacagcaggagagggggaggccaggtgtttgtggctgctgccaccggcccgtccagggtcagctcatgctcccagcctccgtgatctgccactccccacttccctgaggctgctcactgctgtcctttgtccggcggccagccccctgactcagactcacgcgccctgctgctgcccgcccctttgttcccgggagactctaacaaggaaggcttgttcttcccgcaaggacacagagaacctgccagctcccctccatcctcatccagagagagcctgctgtccccgtgggacagtgaggacaggaccagctctcaggctctgctgggcacccagcccatgcctggcaagtcctcatgttacagacgaggacaccgaagctcagaggaaggaagggcttgtattccgaggatttggggggctggagaggggtcctagtgggctctgctgtagcctgcaaggtcctacaagcccaggtccttcctgccctctctggctgcgttggtccctccggactcagcctctgcactcaccgtacattctgcctgatacacccggtccaactccctccccctccaggaaggccttgctcaaatctctccacctccaggatcttccttggaccactgattgattgattgattttttgtttctgttgtttttctgagatggagtcttgctctatcacccaggctggagggtagtggcgcaatctcggctcactgcaacctccgcctggtgggttcaggcgattctcctgcctcagcctcccaagtagctgggattacaggcgcccg[224 bp omitted]gaggcagaagaatgacgtgaacccgggaggcggagcttgtagtgagccgagattgtgccagtgcactccagcctgggcgacagagcaagactccatctcaaaaaaaagaaggaaagaaatagagatggggtttcaccatgttggccaggctggtctcaaactcctgacctcaagtgatccgcccacctcagcctcccaaagtgctgggattacaggtgtgaaccgccatgcccggcctatcgggaccacagatttgatcctgcaacctgcctatcatcatgctgcctgcccccttccctgccttttccttcttcccagcagcactctccacgcctcacctattgcagcggcggctggagctgctcatgccagctcctgagcccactgtgaagttcgcggcgatctgtgagctggttggctcatgttggcagccacgatgggagtatttacaacacagggggcggcgtgcgctgcaagtgagggccttttcccttggagagccagctgttcaacatttctccgcacagcaccacttcggtattatgcccgaggtttatggcataactagcctggctcatggtctctcttccctgctgctcactagaatgtaagctccttcgggccgaggtcagcccaccttgcactctgctgtctccttggcacttaaaacaacgcttggcatacagcaggcactcaataaagatgtgctggcagggcgcatgacgtgtgcctgtggtcccaacactttggaaggccgaggcgggaggattgcttgagctcaggaggcggaggttgcagtgagtggagatcgcaccactgcgctccagcctgggccacagagtgagaccctgtgtcaaaataataacaagcatgaggcaggggggatcagctgaggtcaggagttcgagaccagcctggccaacatggtgaaactctattaagggaggagaccatccctcatattgtcttatgcccaatttctgcctccaaagaaagaagtaaaaactaaaaggcagaaatgaaatccacaggcagacagcccggcgctgtgccctgggcctggtagttaaagagcgacccctgacctactgggttacgttatctatagattccagacattgtatggaaaagcactgtgaaaacccttgtcctgttctgttccgatctgattgccggtgcatgcagcccccagtcacgtaccccctgcttgttcaatcgatcacgaccctctcacgcggaccccctgagagttgtgagccctgaagagggacaggaattgctcactcggggagctcggctcttgggacaggagtcttgccgatggccccggccgaataaaccgcttccttctctaactgggtgtctgaggagttttgtctgcggctcttcctgctacactatctctactaaaaatacaaaaaaaaaaggccgggc[171 bp omitted]gctgagg[139 bp omitted]gtccctcgcgctgctgggactgacgtccgggtacccccaacgcaaccacggcctcccggtgaccctgacccgcgaagcgggccggaagccccgcagcccctactccagaatccgcgtcccggaacctggatccccgaccgggccctgcggccccgacccccgcagcgagcccagcgccggggaacaggacccggcttcccagtctccgcccggggacaccaggctccttgggcgaacggccaggcctcccgggaccagcgcgctggaagactcgcggcggggacgccccctcggccgccccgtgccgggccccacgcaagggcagccggggcgccccgcagtgggaacgcgaggagaccgaccacggggcgagacagccgccagggcgtccgcgccgcccgccccaagcccgcatcagcccgccacgaactcggaggaccgcgggctagagcggccccgccagcgcgcaaagccttgtgggccacacgccccggcgccccgcgctccgcggcatggcgggagttgtggttcagctgcgggggccgcgcgggagctgccgggagctgtgggcggggtgggtgcgcgcgcagtggcagggccagtgagctgcacccgcggaaaaggagggggagcggctggtcagctgcgccctgcgggtcgagaatgtcatcagcagggatggcggcgctttgagtgctgagcgcggccccgaccgggaccccctacccttgacccaccctcgcaggccgagccccgactcccgacccgccgtcgcagcccgcggccccgacctctgacccgccctcgcagcccgcggccccgacctctgacccgccctcccagccagaccctctacgcccgacccgccctcgcagcccatggcccatcggcccggcagtggacgcagagcctcggccccgttccctccccggaccccccggacccgctctccgtcctccctgcagagccgagggccttggcccagccccgcatcctccccgaccgtgctcgatccagcccgggtgtgctgcacccgaaacaggctcccgggggccgtcgggcctgtgggtgaccgtgcaggccaggatctcccccttcccagtcgtgacaaccacagatggccccagatgccacgttagggttagtgcctcctgggggcgggattgcggccgggggagaaccaccctcccaacccgttaggaactgcagggacggagagcgcgctcgggatgtccagcactcagcgcgggttgggtggcgaatggagagcgagtcgtcctcagaggccgccggcctgcaggcgagaaccctcccagccaggaggctgcggctctgcctgaaccccgacccagggcgaacacccacatttggcccctgcccggtgctgagagaggccagagcggcgtccccagaagcggagcgggagccccacgtccggcggccacgatagaaagaagaaaagaaatgggtggtagtaagtaaaataaatcgtatgaaacataaaacaaggccgggcgcgttggctcacgcctgtaatcccagcactgtgggaggccgaggcaggtggatcacctgaggtcaggagtttgagaccagcctggccaacatggcaaaacctcgtctctactaaaaatacaaaaattagccgggcgtggtggcgcatgcctgtggtcccacctacttggaaggccgtcacagtagaatcacttgaacccgtgaggtggaggttgcagtgagccgagatagcaccactgtactccagcctgggcgacaagagtgaaactccagctaaaaaaaaaagaaagaaagaaacgtaaaacaaagatgtatctttatcttatttaatccactgtgtccaaaatactatcctttcgattcataagcaatacatgttgagatgctgtacactctttgttcacgctgagcgttcagagcccagtgtgtattttgcacatttgtgtccacttcctaattctcacaggaaatattcaacctgcacttcaggccactaaagttctagttggaaaagtggcttcacaaaccctagctgttgcacatgttttccaatagctgcgtccgtttctaagttgatattcgtgttagaaaggaggcttcagggccaggcgcggtggctgacacctgtaatccagcactttgggagcccaaggtgggcagatcacttgaggtggggagttcaagaccagcctgaccaacatggggaaaccccgtctctattaaaaatacaaaaattggccaggcgcggtggctcacgcctgtaatcccagcaccttgggaggccaaggcgggcggatcacctgaggtcaggcgtttgagactagcctgaccaatatggtgaaaccctgtctctactaaaaatgcaaaagttagctgggcgtggtggcaggcgcctgtagtcccagctactccggagtctgagacagaattgcttaaacctgggaggcagaggttgcagtgagctgagatcgtgccactgcactccagcctgggtgacagagtgaggctttgtctcaaaaaaaaaaaaaaagtctacaaatacaaaacttacctgagcatggtggcacgtgcctataatcccagctactcaggaggctcaggcgggagaatcgcttgaacccaggaggcggaggttgcagtgagccaagatctcaccactgcactccagcctgggcgacagagtgactccgtctcaaaaaaaaagaaggcttttaaagaaacagtttagtgccctttatggtgtttgcgacgtcgtgtaaacaccagctctctagtctcaaacccggcgagggcggttcatagacaatttcagtctctcgacgcgacgccgtgtggcttgtgcccttctagccacctagaccctcgggagaggcctgtgcggctcctggctgggcccccgtcttcaaagcagcttttgagtggccctttgacccgtgagacagggccgtggaagctggggtgagcctggagatgcccccgggagcaccaaggcgtcagagcagctgaccagggccccaggcctcgccgcttccccaggcagagccggccccaagccccgcctctcccctgggcggagccagccccaagcccccctcccctgggcggagacagccccaggccccgcctctcccctgggcggagccagccccaagccccccctcccctgggaggagacagccccaggcaccgcctctctcctgggcggagccagccccaagcccccccctcccctgggcggagacagccccaggcaccgcctctcccctgggcggagccagccccaagccccccctcccctgggaggagacagccccaggcaccgcctctcccctgggcggagccagccccaagccccccctcccctgggaggagacagccccaggcaccgcctctctcctgggcggagccagccccaagcccccccctcccctgggcggagacagccccaggcaccgcctctcccctgggcggagccagccccaagccccccctcccctgggaggagacagccccaggcaccgcctctcccctgggcggagccagccccaagccccgcctctcctctgggcggagccagccccaagcccccctcccctgggcggagccagccccaggccccgcctctccctgggcggagccagccccaagccccccctcccctgggcggagccagccccaagccggctctcaccatagtgtgcctcctgccccatggacccccatccccccagacccctcctgattagctcaggtggggctgccgtggagaccacaccagcatcatcgcctgaggctccatgtccaatttccccggggctgctggagactgagcactgccccagcccctcaccaggcggtcactgaccccagggaggcctgtcagctctgcccaggctcagcgacgtggtcagctcggccagcctgcggggagggactcgactcggacaagggtt[132 bp omitted]gcaagctccgcctctccgggttcacgccattctcctgcctcagcctcctgagtagctggaactacaggcgcccgccacca[323 bp omitted]ccatcgtgggcttcatggctacaactccacacgtacacacgcacacacgcatgcacgcacacagacgcatgcacacacacacatgcatgcacatggctacttattgaaccccctcctgcagcctccatcaatctcattcctcccccactctccttgcgaccctcaggtctggggtccttggactgggttcaagccttgtccaacaaggaggccctgccgtgatgggggtcctcactccaaagaaaaagccatgaggaccccagaactgaccagtgggtgggagacaggagagctggcccagctgggtcaagaagggtctgtcagggcctggggcgtgctccgctcctggacaacggcgccctcacagccccttcccctcagggcaacacagtcatctggaacgctccctcggcagctgtggacagggaggccaggatgtggggtctggggctggtgggatggctgggaccctccatgggaaggggggcttcctggctgggaccctccatgggaagggggcttcctgacggaggccgccgaggacaatgccgggaaggggattgatgttgggggcggggtcgagtctcccaaggacaaaaaggaggtccccgttgccggcggaagatacggtgtaggccttcctgtgggactaggactcagacccaggggtctcagggtcctccccggccctcaggctgctggcccacctcggtctctccatccctctgcctctgcctctctgtgtctctgtctctgtctccctgtgtctctctgccttctctcttcctcgctctgtctctgtctctctgtgtctctatctccctgtgtctctctgccttgtctctcttccttgatctgtctctccctctctgtgtctctgtctccctatgtctctcttcctcactctgtctctgtctctctgtgtctctgtctctctctctctgtctctgtgtctccctcacccccgccttccccacctctggccgttgaaacctgcgggtccctctgcctctgggaaccctccctcctccttcctgtgtccatcccacctgccctgtcctcagggggaccccagctttgttgtctccccgcccccacaagcctgtggatgtgagggctcggcacacggggactgtgagcagcgtgatcaccacgcgtgacccagcgggcgggcgggggacagggccctggagagctgggacacaccctgcaaggggcctcagccctcctggcgcccagtggtccctccccacctgcaggaagtagggtcgggggctgggaaacagcccattcaccaggcctgctgccccccgcccgggttaagggcccagcttcccgggaagggcctgcacctccggcctggggagggcccctcctcggagtctgctttccggtgaggcctttcccggcaccagcctgggcaggagggggatgggacccagggagacagggctgtgagctcacacacctgggccctcacctctgaggggactgtttccccaccccgggcctcagtttccctcctctaggcctcagtttctctcctttgcacccagcccctcctctaggcctcagtttccctcctcagcacccagcccctcccccgagcctcattttgcctcctctgcacccagcccctcccctaggcctcagtttccctcctttgcacccaggccctgccctggatctcagtttccctcctctggtcccagccccacccctgggcctcagtttccctcctctgatcccagcccctcctctgggcctcagtttccctcctctggtcccagccccgcccctgggcctcagtttccctcctctgatcccagcccctcctctgggcctcagttttcctcctctggtcccagccccgcccctgggcctcagtttccctcctctggtcccagccctgcccctgggcctcagtttccctcctctgacaggtaagccgattggcaatgcttggaaccccatggactggctgctgctttttattccatggccagggaaactgaggcacagacagaccctgaggtcagcaggaatgctccatcattttattcccgcgtgcctgcggtgcatggggtccagggtcacaggaccggcccctgggtggaggggagccagccatcacgactgccaccacaggccctcattgagctaggagcagagcaccctgggaaccacagcggaggagggtggggggcgagggggtgagggggtgggcagaacctgggtaaggtgaggagcagcccgggcagagtcccagaggccctgggagggtcccggtgatgcaggggggtaaacaagccaccagcggagacagaaccagtgtgcggggcttggaggaacaggtgggtggattccagtgcgtttggaagatgaggttcccaggactcgctgatggcagctgtgagtgggagtccagccagcatcccttccagatccctcttgtggaccgagatccaggtctcagtgtagaccaaggaacagaggcagcccctactcgggctcccaggctccagccaggcctgctaggtgggcggcctctgcccgtgtgatggaaggaagccaggctcagagatggggtgacttgtcccacgtcctggagggtctcacagctccaccacggccaggagacttcagtccagggggcctccatccccagcgaccttcacctgacccccaggggaccccagccaacaagacccggcctgcagctccggaacgggggagggctgctctccaccgcccctgtgcggccgcccgggaaagtgcaggcgggccgggcgcggtggctcacgcctgtgatctcagcactttgggaggccgaggtgggcggatcacctgaggtcgggagttcgaggccagcctgcccaacatggagaaaccctgtctctactaaagatacaaaattagccaggcgtggtgacgcatgcctgtaatcccagctactggagtggctgaggcaggagaatcgcttgagcccgggagacagaggttgcggtgagctgagatcgcaccattgcactccagcctgggcaacaagagcgaaactcagaaaaaaaagaaaagaaagtgcaggggacccgccgtcggggtgggggcggcgctgcccagcctctgtcccacttccatgcacttgacctcgaccctccggcctccgtctgcgatcttcccgtgcctgaatatgaggcttggaacagacccagaccttcctgcctgcccgtcctgagtggccccgggaccccgccccatctttggcccccagcccctgcctctctgccgcctccagggtcgggggtcaggccaggaaagccccttgggaagcccccggggagcagctggagcggggtcgccgggcggcgggaaggagtgggcgcctctatttaagcggcttccccgcggcctcgggacagaggggactgagcatggatttcggactggccctcctgctggcggggcttctggggctcctcctcggtgagaaggggagggggcgcgggagagaggagtgagttaggagggggctcaggagagaggagggggctcaggagaggggagggggctcaggagagaggagagggcccgggagagaggagggggcccaggagaggggagggggctcagtagagtgggggggctcaggagagaggagggacgcaggagagaggaggggcgcaggagagaggagggggctcaggagagtggagggggctcaggagagaggaggggcgcaggagagaggagggggcgcgggagagaggagggggcgcggaggggagggggcgcaggagagaggagggggcgcaggagagtggagggggcgcgggagagaggagggggcgcgggagaggggagggggctcgggggagaggaaggggcgcggtgagcggggaggggacgcgggagagaggagggagttaggagggggctcaggagaggggagggggctcagtagagtgggggggctcaggagagaggagggacgcaggagagaggaggggcgcaggggagaggagggggcgcaggagagtggagggggctcaggagagagaaggggctcaggagagagaaggggcgcaggagagaggaggggcgcggaggggagggggcgcaggagagagcagggggcgcagtaaagtgaagaggactcaggagagaggagggggcgcgggagaggggagggggtttggaagagaaggggggctcgggagaggggagggggctcgggagaggggagggggttcggaagagaaggggggcccgggagaggggagggggcccgggggagaggaaggggcgcggtgagcggggaggggacgcgggagagaggagggagttaagagggggcgcaggagagaggaggggctcggagggggcgcgggagagacgaggggtgctcagagttaaggggctccgagatagggggtgattggtgatcctgccagaggagggggctcggaggaggcaggggctgagaggggaagttgcggggctccgcgcggccccctgacccgcagcgaaactggctccaggcagctggggttcgggggactggggcagaggcggcggtcggggcggggttcagggaccgagcctgggagtccgggtagcggcggggcaggggtccgggggtgcagcggagggtccgggaaccgggcagaggcggggcggggtccgggggtggagcgggacgcagggccggtggcggggcggggtccgggactccgcggggctgagcgagagccgcggtcgccgcaggccagtccctccaggtgaagcccctgcaggtggagcccccggagccggtggtggccgtggccttgggcgcctcgcgccagctcacctgccgcctggcctgcgcggaccgcggggcctcggtgcagtggcggggcctggacaccagcctgggcgcggtgcagtcggacacgggccgcagcgtcctcaccgtgcgcaacgcctcgctgtcggcggccgggacccgcgtgtgcgtgggctcctgcgggggccgcaccttccagcacaccgtgcagctccttgtgtacggtgaggcgtccccccgcgccctgcctctctgacccttggactcccggctccttccctatgccacctcttcctggaagcctcccagattgcaggcagggtcccagctccatgcacagctccccgaagccaggtccccggccttcgcttccctccaactcaccccaactctcccagggccggccctggcccatcctcctgtctattccagcctcccagggtggggccacggggcctgcgcacaggccgtccctactgcctgttcatcagcagcccccacgcatccttggccccagctccaagcccctccgggctccggcccctccatcacgtccagccctgactctgggctcagccctcacccccgaccctccatcacagccttcccggaccagctgaccgtctccccagcagccctggtgcctggtgacccggaggtggcctgtacggcccacaaagtcacgcccgtggaccccaacgcgctctccttctccctgctcgtcgggggccaggaactggagggggcgcaagccctgggcccggaggtgcaggaggaggaggaggagccccagggggacgaggacgtgctgttcagggtgacagagcgctggcggctgccgcccctggggacccctgtcccgcccgccctctactgccaggccacgatgaggctgcctggcttggagctcagccaccgccaggccatccccggtgagtccgctgggtgccctggagacccacccgctcgccagccttgacaagcacttcgggacggggtgggggggtgggggggcagcacctgtgctgtggggcgctgggaggactggattcccccacgcagcgacagcgacattcatcgacgcaacatgtatttgccgagcacctgccccccagcacaggtcccacccctcccctgcccacagcgctccatggctcttgccttggggtcaaagcccaagtcctcccgggggcccacaggaacctgcacgacctaccctgtccccttcctgtcctccctccaccctttctccccctcctcattctgctgcagccacacgggcctcctcgcctcctcgctgttcctccaacacaccaggcgtgatcctgccccggggcctttgcacggctgtgccctctgccgggaatacccttcttccggatctttccacggctctctcctcctccccctcaggtctctgtagaatgttgcctcctccgtgaggcttccctggattcccgtttaaagggtcaacccctgatccccaacgtgtacaaacataggcacacaagcacacacatgtacaaacacagacacacacacgcgtgcacacaggcacacacgcacacgcgtgtacaaacaggcacacaagcacacacgggaacaaacgcacacacccacacgcgtgtacaaacacaggcacacaggcacacgcgtgtacaaacacgcacacgcgtgtgagccccctttcccttctgtttcgtttcttgacaccttggataacatctgacatcccccagtcccgtacattctcttttccatgaccttctcccactgtggctccccaggtgggaatcttgtgtcgcgcacggctgtgtccacagaagctagaacagggcctggggcatagcaggtgctcaataaacccttgctgaatgctcggatgaagacatttaatgtgggccggtgccctggcggtgctcccttcacgctctgtccaatcccgaagcccctgccggcttctcccactaaagaaaaagggatttgtcctcccatggggcaccctgatacccatgttaatggacgtgaggtcgtgagtttcaagcaaagggctcccggggataaagcagaagctgggagacccgggaggtctttgtggtgggggtggggctggggtgggcagagaggaggctggatttgagggatattttacagaacacgggccctcacgggcctcagtctccccatcagtcccacaggggatggagcagaaggccagggcagaaagcccccaagcaccttctctctccacgccagcctcctcccaactctcctcgtccacagcccatcataataaacgcgggacccactcgctctcagggcagcccaaagaggtgactctcacccctttgacagttgaggaaactgaggcacgtggagattaaggaggctgctggggtgatgttgccagtgagtgggggacctggaatgcccggactcccatcctgcccactgtggtgcctcagcttcctcatctgtccagtggacttccctgactgtgggtcctttgtaaatttc[134 bp omitted]catagtgaaaccccatctctattaaaaatacaaaaattagatgtggccaggtgcggtggctcatgcttgtaatcccagcactttgggaagctgaggtgggtggatcacgagattaggagatcgagactagcctgaccaacatggtgaaaccccgtcccctactaaaaatacaaatattagcctggcgtggtggtgagcgcctgtaattccagctactcaggaggctgaggcgggagaatcgcttgaacccgggaggcggaggttgcagtgagccgagatcgcaccattgcactccagcctgggcaacagaacgagactccatctcaacaacaacaacaaattctaggctttatcaactagaacagtaagccgaatagaaacaaaaatgtaggccagccatgggaggctgaggcgggaggatcacttgagtacaggagttccagaccagcttgggcaacatacgagacctcccatctctacaaaaaaatttaaaaattagctgggcgtggtattgcacacctgtggtcccagctactcaggaggctgagtggggaggatggcttcagcctgggaggttgaggctgcagtgatccatgatcacaacactgcactccagcct[142 bp omitted]agaaaccccatctctactaaaaatacaaaattagccaggtgtggtggcaagcgcctgtgatcccagctactccagaggctgaggcaggggaatcgcttgaacctgaggagcggaggttgt[135 bp omitted]gcttggaggggttctggtccaagcccttcatccagatgcggagattgaggcaggagaggcaagcctggggcagcagagaggaaaaaaaaaccctcactctgtttccagtcctgcacagcccgacctccccggagcctcccgacaccacctccccggagtctcccgacaccacctccccggagtctcccgacaccacctcccaggagcctcccgacaccacctccccggagcctcccgacaagacctccccggagcccgccccccagcagggctccacacacacccccaggagcccaggctccaccaggactcgccgccctgagatctcccaggctgggcccacgcagggagaagtgatcccaacaggctgtgagttctggtccctgggggcagggagggtgggaagggctgagagcgagaggttccttggatgaagactttagacaagaaattgccctgcccagccttggtttccccgtctgcccagcctcagtttccccgtctgcccagcctcggtttccccatctgcccagcctcggtttccccgtctttccagcctcggtttccccatctgcccagcctcagtttccttgtctgtccagtgggcttctcttaactgtgggtcctttttgtaaacatcagggactgtgtagatgtcaaggcacttggtaaattctaagccttgtagactagaagaatctttggaatagaagcagaaacaatgcggccacataggtaatttctttcctttttttttgtgagacagagtctcgctctgtcccccaggctggagtgcagtggtgcaacctcgactcattgcaacctccgcctcctgggttcaagcgattctcctgcctcagcctcctgagttgctgggattacaggcacccatcaccactcccggctaatttttgtatttttagtagagatgcggt[135 bp omitted]cccagtgccacaaagaaatagcactcaaacaaatttaattctctcagcaaggccacttttactttctgcagaaagggtgctcattgtagacggaacaatggcgagagcacagctgaacaaaggaaaagcagacatatttatccctcacacatttgggtcgcccttactgctgtgtcctgcatccactggctggagcaggatatcacactcttaaactgatacccagtttgctaacaacctaaaactttcctaagtaggtaagcgcaaaggaggacaaacaaggagaggaagttgcttacgaaagatttgaggaagcagtaacatttccaaataaggaaggggcataagctatgagctaagacttccctgggactctccagatatgcctgggtaagcccaagcaactaactgggctaaagtgtaagaactaatagctgataggaggctttagagtaagaagctattatttctagtgtctatgtctattattttatttgtaaatcaagacgagctttgaagaggaacttttctacttcctacaggtaatttcaaatttaaaagtaaaggcaaggcatgaacccgggaggtagagcttgcagtgagccgagatcgcgccactgcactccagcctggggcacagagcgagactccatctcaaaaaaaaaaatgggccggg[138 bp omitted]gcagcgggcgcctgtagtcccagctactcgggaggctgaggcaggagaatggcgtgaacctgggaggcggagcctgcagtgagccgagatcgcgccactgcactccaacctgggagacagcaagactccgtctcaaaaaaaaaaaaaaaattaaaagtaaaaataatgtggtcgggccaagcatggtagctcatgcctgtaatgccagcactttgggaggccgaggcaggaggatcacttgagcccaggaggttgaggctgcagtgagctgagatcacacctgggtgacagagcaagactcagtctcaaaaaaaaaagtgttggccagacacggtggctcatgcctataatcctagcactttgggaggccaaggaggaggatcacctgaggtcaggagttcgagaccagcctggccaacatggtgaaacctcatctctactaaaaatacaaaaattagccaggtgtggtggcatgtgcctgtaatcccagctgaggattactcgggaggctgaagcaggagaatcacttgaacccgggaggcggaagtggcagtgagctaagatcacgccattgcactccagcctgggggacagagcaagattccatttcgaaaaaaaaaaaaaagtgtggtcatacatttcgcagagcccaatatatcccaagcattatcatttcaacaggtaatcaatataaaatagtatgaaggagatatattacattcctcccttttccccagactaagtcttcaaagtgcagattgtaggctcagcacccttcatggtggtgagccgtcctctctccggtctgcccttttttttttttttttttttttttgagagacagagtctcattctgtcacccaggctggagtgcagtggtgcgatctcagcttactgcaacctccacctcccgggttcaagtgattctcctgcctcagcctcccaagtagctgggattacaggcgcctgccaccatgtccagctaactttgtatttttagtaggcacagggtttcaccatggtcaggctggtctcgaactcctgacctcgtgatccacccgctttggcctcccgaagtgctgggatttcaggcgtgagccaccccgcctggcctggactgcccatttctaaactctaaggtgctatgcgcatttcaaaagggtcatggtaaagtcctttgtgaaatttcagggaacgtggtaactttggaagcacgtgtagcctctgaggggctcctcccttcccaagcctgcagaggcctggagggctctgaccggggtctcctgcactctctccccagcgtccaaacctgcgggtgaccagctgcccgcggctctgtggaccagcagtgcggtgctgggactgctgctcctggccttgcccacctatcacctctggaaacgctgccggcacctggctgaggacgacacccacccaccagcttctctgaggcttctgccccaggtgtcggcctgggctgggttaagggggaccggccaggtcgggatcagcccctcctgagtggccagcctttccccctgtgaaagcaaaatagcttggaccccttcaagttgagaactggtcagggcaaacctgcctcccattctactcaaagtcatccctctgttcacagagatggatgcatgttctgattgcctctttggagaagctcatcagaaactcaaaagaaggccactgtttgtctcacctacccatgacctgaagcccctccctgagtggtccccacctttctggacggaaccacgtactttttacatacattgattcatgtctcacgtctccctaaaaatgcgtaagaccaagctgtgccctgaccaccctgggcccctgtcgtcaggacctcctgaggctttggcaaataaacctcctaaaatgatacaaacgtgtcagttttctcagttgacacccactccgtggagaggagaggtctgagggctccggacagcagagggttgactgtgggtcctgccctgatggctccatctccctcatcccacagtccggggctggagaagaaagtgttagaaatgcttgttccccggtgccgtaaagaaatagcacttgaatataaatgtcatttcctcagcaaggccactgttttactttctgcagaaagggtacactggccagcagttttgccacgagagtatccagaacaaaggagacagggtcatttataacctgacgcgtccaccctactgctctgtccggtttccattggctggaacgggacggtttccattggctggaacgggacctcacattctgtatttatcccgatcggctagcagcttggaacttttaaaaagaggcaaaggcagaggagaacaaaggaaggaagaagtagcttgtggaatgctaagaaaggtaaaaacaccttcaaataaggaagaggaacaggttatgacctaatgcttgcttggaccagtataagcatgccagggcagatatttagcctacattgtgggcactaagaacataaagtatgttgatttccttattacattatatatattcaatataac[331 bp omitted]cccggcctaccacaggcctttgaatacattttgcttctaagagaagttactatttattcctaattagatggggaggaaagtctcatttgaagaggaacctctacttcacgttttacaaagggcatttggtctgcccgccagagattcctgtgctgggaggatggtggaacggtcccccggcaaacagctctcattgccccctgcccggggcaacgcccctgagggacggggacggcacccagcaagctctgcccggggcggggaaacgcgagggcttagtggtttcctcggtgagaagcttaaccaggagtccccgaaagcagtgagggaagatccacagaggtcgcctggggaaacacacccagaggcggcttatggaggagactgcttgtgttttgaggtggctgcgggctgcggagggttgggagggccgggagggcggccggaagcgaggtcaggcgatgaaggcctggaggtgccagcccgggggccctggagagccatggcagagtttacagctctggaggctgcggtgtcagaaagctccctctggcggtcagggggtaacagcgcgggatgctcgcccgtgtggccgccaataggggctcagcgcagctgcagcggagctggggagggggcttctcccacgaggtgagctacgcactcagacgttgactgagttaggcggaaggccaggctgagctcgacccccagcaccaaggctcagagatgaacatgagaaaagggtctgggggccgggcgcggggctgggtccagcagtcctgggcaggtccagccccgcgcatgctccgtcaggcttctctgctaaccagggagactggttgctaggagaccatgctaatgaaggactcgctcactacccaaatggcaagcaatccggctttgtgccagaaacgaagcacttccgaggcagccattttggagtctggcaaaattcaggaccgaggccaaagccaggagagccaatcaatatacacaaagagggaggagaagagagagtgccaataaggacacaaggaaagtggtagcgtacccttgtcacttcccaaagtctcccagcgggataccggtgccctctgcccttaatcaagatggccgccttgggggggctctagcgcacagtggaatatggcggtgcttccggtcccgctgccctcagcgaagatggcggcagtggagaagcggcggcaagcggtaccaccgccggccggtttcacggacagcggccgccagtcggtatcccgggcggcgggggcggccgagagcgaggaggacttcctgcggcaggtcggcgtgacggaaatgctacgtgcggccctgctgaaggtgctggaggcgcggcccgaggagccgatcgccttcctggctcactacttcgagaacatgggcctgcgctcgcctgtaaacggcggcgccggggagcccccgggccagctcctgctgcagcagcagcgcctgggccgcgcgctatggcaccttcgcctggcccaccactcccagaggtgcgcagtgggccggcttgggcgggtggggcagcgatggacttcaactcccagcatgccgcgcgcggctccctacccgcagcgccggcgcaggggcccggggcttgctgggagttgtagtgcgcgatgccttcttgggtgggatggatcggacaaggtgggctggagggtccgggcttcggtccggcgctaggcagcgcgctgcatgcggcgcgagtccttctggccggcttcgccttctgtgatgcctttttgcaggtgctgagtttccccttgcagttcatgattttcaaaatcgtgcagctcaagaggacttggcccgaggtcgcagagccagcccccgagccaggtcctcctagtcgcctccttagcagcctcatgttatccccgtccattcagccagaacgtgaatatttacagagagcagcgcagtcacccagggcccccatcttaggggacaggctcccagcgggcaggtggggattcctggaagagcctggcgatgtgcgggcgggttgcagggaagaggcccagcaggtgcaaatttagaccccgagtgtggggcacacgggaggcgggaaagccacggaatttggctgaagcatgcgaggctgcaggtgcctacgcgcggtgtcccctggctggggccagttctgagcccagggaaggtggttggggactatctgttggcgttggggatggatgggctgatgtcttttgttggggggggggtccccagaagcggagcctgaggtaggcattgtgtgtgcaggtgattttacaagggggtgcgcccaagagaacccaggaagggggtgggaagagcaggcagggaaggatgccaagcaaaggtgccctttcagcctcataaccagggcataagcgcccaccatggcagccctcgccagagtcccagagaagttcggggggagaagagagatggggagtgtcccccctaccacgttcagggtgcacaggtgtccaagatcatactcagataagggtggcagggtgttgggtacctggacaaggagcagacttgctccggtggcccagtggctctgaaggccccgcccgatgatttgctggagccaggtgggaggggagcgggcaagggcaggcccagagggtcagtggagccgtttactgcgatggaaggcccctggtttgaagaagctgccagagccacttgcggattaagttggaggctgggaggagcctggagacaggaaggtagaaagaagcgtctgcaactgacgtggggccaggacagaagactgaactggaggggtcctgaagtcttcaggagagatgagaagagctcaggaccccactctgagggcacctagcccagagagcccaccagagagggtgagaacgtgagaccagaggtgaacggggagcaggaggaagatggcctcccaggacatccggaagagaatctcccaaggaggaaaaggggtcaacagcaggcccaccacgtatggttgttcaggttgagcactgcacaagccactcaccccgtagacactgcagatgaggatatttatatttatattaatttccgagggctgctggaacaaattacctccaacttagtggcttaaaacaacagaaatttattctctcacagttctggagggcagaagtctgaaatcggagtgtcaggaggaccacactccctctggaggctccagggaaggagccttccttgcctccccagcctccagtggcggccagcagtctttggcttgtggccacattgctgcagtctctgcctccgtcgtcacgtggcctcctgtgtgtctctgttctgtgttccctcataaggacaccactaggccccaccctactccagtgtgacctcaaccgcctacatctgcaaagctgctgtctcaaataagctctcagtctgaggttctggatgggcgtgagtttggtgggcaccagtcaccccaggacaggagtggagccattggctggaagagttctcatagcagggactcagggcaagggtggtgctggtggcagatgcatcccggccctgggctcgcctgggctccccagagacacagccagtggggaatgcagaagacaggtgcacagacctgcgtggcatctgattctgtgctcatggagccaggcctgctcccgtcctcccagcaggcagctccggccgcccctccatccttggaccgtcaggaacccctgaggtcacctgaccagtcaggaagagaagcccagagcagccgggcgcggtggctcacgcctgtcatcccagcactttgggaggcc[296 bp omitted]cccccaaaggctgaggggctgactggggctgctcctgagagcatcaccgtggtaggctgggggagaagtcaccccagatcctccctggcaccttcttttgagaaatggcaagctccggccgccagggctggtgatggcagccacagtgtccccctcctgccaccttcctggtcgtctccaaggccccctggagcacacacacagacgttacatgacttgctgaaggccacacggccaccgagggcagagctggggtcagagagccccagagtgcagccccggaggcctcctcagccaccacgttgctcatcctggcagcaagggctgcactgccccctgcaggtcactgccaggaaaacgtgcacgaaaacgaagccccagctgatctgggccagggttcccccgactcgtcctctgggggccgtcctgggtactgcagggccctgagcagcgtccctggcctccacccactccttgccaggagctccccgagtcgtgacaaccacagatgtcccagacaccgcccggcgtctgctgggggcaggagtgggaagcagaagtctaaggtgtagggtggctcctgtctctttctggagacgttccataaatagaatctttcctgtattaacaaatgctcacacgccttacaaaccgctctgtgtaggagccgacacagacggagccctggctgggctcccgctttccattttgcaatcagggaaaccaaggcccagaggccaccgtcacaggcagagctgacgttccagccccggcctcctcctccgagcccagagcttgctgccttcctcttcctcctcctccctcacccgatgattctgctgggagccgcccgggagcccaggaggggcgggtatgcggccgccttgaagtgggctgtcaccttcctgtctcctgccgtcatcatggctgtgatctcaccaggctgtaattacctctttgtgtgtcttcctgcccctcaaggcagctgtggctgagctgcagccctaattacagcccaaaataagcaggtggggcctcccacacgtatgccagctgctgtcctgagcacctggctccagccccgttctcccgtcctcacaagaacccccactccgtagatgcacaaggccaggtgcagaaaaggagagtgcacacagctgggaggggcagacgaacacccgaggcaggcctgggccaggcacagagccctgcacaccgaggggccgcgtggatgcttgcggagctggaccagggctgccgcccccagagaggagagcatttatgcagaagtggtggtggatggcgctgggtaatcccggcccacagacctgtcagtcagaagctgcgagcacgacaggaaccaacaaccccaaacctcagtggcttcaacacaagcaaaactcttctcgcttactctgcaggggacgtccagttgtttttttgttgttttttttgagatggagtctggttctgtcacccaggctggagtgcagtggcgcgatctcggctcactacaagttccgcctcctgggttgacgccattctcctgcct[213 bp omitted]tcacgcagcctgcagtgcagtggtgcaatcccagctcactgcagcctcgaccgcctgggctcaagggatcctcccacctcagcctcccaagtacccgggaccacagacgcacgtcaccacacctggctgatttttaaatttttgtagagacaggatctcactatgttgcccaggctggtttcgaactcctggactcaagcaatcctcctgcctcggcctcccaaagtgctgggctcacaggcaggagccacggcacccccacccaccccccaccaagggcttgtctgatcttgacacgcacctgcaatcatgaccacagagaagtggactgagaagtagcacgatggctcttaacattcccgctgaaagtgggccacgccccctcgcacgtttcagggggcaaagcaaggcccagaggctcaccctcggcggggtggagaagtggcgggtggagaagtggcggagggatccgcggagcagcgctgccgtcgccagccttcgagatgcccctgcaagcctcggctcccggggttcacggcctggtgccgtcccttccccctgcacagccggaacgggactgcagaagcaacggacagagtgtggcctccgaggcgggtcacgaaggacatcgtggtgtccccctccctcctgggtgggttgctggctcggctgggcagccgccatgcggtggggtcgctcgcgcagctcccagggagcacctgcagccgctgccaagagccgcgcgggttcccctgcgggggactgggccgcctcgcgtcgagccccgggggagtgtggccacggcaacctcctaagagaccccaagccagagcctcgcagcaaagccgccgccgagacgctgtgtcaatagtaaatgcttgttggttttgggcctctaggtttggggtgtgatctgtgaggcggcagcagcctgcccggcctcacagcagatcctgatgagaggggccccggtgcggctcctgctgggtcatgcggagaggtcaggcgtgatgggagctcgggccgccgcgctgacactgcgactgcccccagcgcattttggggatgacctcatggatggtaaaagcgcccagcggattataagggccaacaaatggggcctttactacttgggagggaaaaggagcgtacagccagatgggcctagagttgaattgcaggtcgctgccctcctgcctctgggcctcagtttcctcctccatagcagagctttgaccctcgagctcgctgagatggcacgtccatccctaagccctgaactgagcagcagtgatgaccagggaggcacgtgttcaccaggcacccaccgtgcaccggcccagcattactgagcacctactgtgcacccgcccagcatttactgagcacctactgcatgccggccctgcattactgaacacctactgcacaccagcccagcattactgagcacctactgcatactggccctgcattactgagtacctactgcacaccagcccagcattactgagtacctactgcacaccagcccagcattactgagtacctactgcacaccagcccagcattactgagtacctactgcacaccagccccacatttactgagcacctactgcacactggccccacatttactgagcacctattgcatcctggcccagcatttagtgagcacccactgcacacaaccccagcattactgagcacctactgtgcactagtcctgcattactgagcacctgctgcacaccaacctgccccggccccacatttactgagcacctattgcatgctggcccagcatttactgagcacccactgtacacagacccagcattactgagcacccactgcacactggccccacatttgctgagcacctactatgtaccagccctgcattcactaagcacctactgtacaccagccctgtattactgagcacccactgcacactgaccctacatttactgagcacctattgcatgctggcccagcatttacttcactcccactgcacaccgccccagcattactgagtacctaccgtgtactggccctgcattcactgagcacctactctacaccggccctgtattactgagcacccactgcacaccgaccccacgtttactaagcacctattgcttactggcccagcatttactgagcacccactgcacaccgccccagcattactgagtacctattgcacaccagccccacatttactgagcacctattgcattctggcccagcatcactgagcacctactgtgtaccagccctgcattactgagcacctgctgcacaccaaccctgcatttactgagcacctactgcatgctggcttagcacttccccggcacctaccacaggtggcccacagaaaggtgaagtcgtgtgcccaggtcatgccggagggaaggctgccctcctcaccatgaagctgagctcccagaagggaaaagcgtaagccctgaggttggccacttcctctctgggacccttggccagaccatggggctgccctgagcctcagtttccctatatgtcccagaggaagtaacaggccactagcatgaggcctggccgggaactgatggggggagtgaggccagggggttaagcagcccacccagggtcctgcagcggcccccacgctggccacggtgctccctggccactccctggtgccctccacgggagtgtgtgtcacactaccagcacacgagtggcacgtagtaaggcctcaggctcctcactggggcagggaatcgaacccaccccagagccggcagcagggctgacagccttcttctgtaaggggccagatagtgaacatttcagctttgcgtggcagcctccatcctgacattcagctctacggttctggtcggaagctgccacaggccacatgtcagcggactgatgtggttatgttccgataaagctttatttacaaaagcaggcagcaggtcgtatttgaccctcaggctgactgtggggccttgcctgtgggattgtggggagagaaataccaccactggccccgagcagcaactgtcacctgtaatcccagcagtttgggaggctgaggcaggaggatcgcttgagcccaggaggtggaggctgctgtgagccctgattgtaccactgctctccagcctgcacaacacagtgagaccctgtctcaaaaaaaaaaaaaaaagaaaaaatgc[212 bp omitted]gaggcaggagaatcgcttgaacccgggaggtggaggttgctgtgagctgagattgtgccactgcactcca[224 bp omitted]gaggcaggagaatggcgtgaacccgggaggcggagcttgcagtgagccgagatcccgccactgcactccagcccgggcgacagagcgagactccgtctcaaaaaaaaaaaaaaaaggaagaaagaaagaaagaaaagaaaaaaacaaatgtcagttgtgttaaatgttgggcacagtatttggccacatgtaaacaggcgctgctgctgcagggagggagaccagagggtcctggtgttgtgggacaaagagtggagagaccgaaaaaggttcaggagagtttatcaaggtgatcaccggctcagctggacatacatccagaaagtctgagcctcgaacaaagggcttttcctatttttaaacatcgtaaggcgggaactacgtgaggcgggaagcaagttacagaggcgagaaacaaaggcagtt[139 bp omitted]cctcagactcccgagtagctgggactacagacgtgtaccaccacgtcccgctaatttttgtatttttagtagagatggggttt[143 bp omitted]aacttatcggttttgtgaccctgcagccgtgctagggaggtaagcaggaactcgctgggcctgtaataaactgaggaatgtggagttggagagtatagataaggtccactgactacagagagaagacaggctgttaacattctcttttaacttgagtgtaagggtgggggtcacactttgcagcaactttaagaggattttaaaatttctatgactactactattaggttagagctgatttcactaattccttcttcactggggccagatgccccagacagatgcctgccgttgattcaagacatttactgagcacctactgtgggcagggcagtgttctgggcaccagggctataaccaagacgaacttccggccctggagggcaggtgctcacactggtgggagacatgaagctcacagggatgtgggacagcgagtgagacaggatgaccactaggaagaaaacaggaggaaaggagttaggggtcaggggaggcgacatttgaggagagacctggaggagaccagggaggaggtgagggagatctgggggaaggcagtgtcacggcccttgcagaggccctgaggccggtccagttggagctgggaagccagggctggatgggagctgcggggaggagaggcctgagctgggtggaggctgggaggggggaggccaggctgggtgggggctgggaggggggaggccaggctgggtgggggctggccaggctgggtgggggctgggaggatggaggccaggatgggtgggggctggaaggggggaggcccaggctggggggtgctgggaggacggaggccaggctgggtgggggctgggaggggggaggccaggatgggtgggggctgggaggagggaggccaggctgggtgggggctagaaggggggagacccaggctggggggtgctgggaggacggaggccaggctgggtgggggctgggaggggggaggccaggctggggggtgctgggaggaggaggccgaggctgggtaggggctgggacgggggaggccaggctgggtggaggcggggatgagggagacccaggttgggaggaggaggccgaggctgggggtgctggtggggaggggaggcccgggctgggcggtgctgggaggagggaggccaggctgggtgggggctgggaggaggaggcccaggctgggtagaggctgggaggagggagatccaggttgggaggaggcccaggctgggtagaggctgggaggagggagatccaggttgggaggaggccgaggctgggggtgctggtggggaggggaggcccaggctgagggggtgctgggaggaggaaggcctggctgggtgggtgctgggaggagggagccccgggctggggggtgctgggaggaaggaggccaggctgggtgggagctgggaggagggaggcccaggctgggagtgctggtggggtggggaggggaggcccaggttgagtaggggctgggaagagggaggccccggctgggtaggggctgggaggagggaggccaggctgggtgggagctgggaggaggggaggtccaggctgggtaggggctgggaggagggaggcccaggctgggagtgctggtggggtggggaggggaggcccaggttgagtaggggctgggaagagggaggcccgggctgggtaggggctgggaggagggaggcctgggcttgggatactggggggaggagaggccagggctgggagggggctgagaggaggaggcctgggctggagatgctgggggaggagaggcccaggctggggatgcttgggggagggaggcctgggctgggaggggactgggaggagggaggcctgggctggggatgctggggggaggagaggcccgggctggggatgcttgggggaggagaggcccgggctggggatgctgcggggaggagaggccctagctgggagaagggaggcgggggctcaagagaggagcttcagggatagagggtgaggaggaggggaggccggggatggggggtaggaggagaggggaggccagggctggctggggggtcggggaggctagggcataggcctggcgaggaggggaggctggggctgggtgggcgcgcggtctctgccggcccccaacgtccccgtctccgcagggccgccttcaacaacaacgtgagcgtggcctacgagtgcctgagcgccggcgggcgcaggaagaggccggggctggacgggcgcacctacagcgagctgctcaggcgcatctgccgggacggccaagcccccgaggaggtggtggcgccgctgctgcgcaaggtgcagtgccgtgaccacgaggcggtgccgctgagcgtcttccgcgcgggcacactcacctgcttcgtgctgctggagttcgtggcgcgcgccggcgcgctcttccagctgctggaggactcggccgccgccgtggccgaccgccgcgtgggccaggccgtgctggacaccctggagggcgcgctgcaggccagcgacgccgccgcgcccgcgcgcttcctggaggccggctcgcgcttggggcccgacagcctggcgctggcgctggaccgcgccgtcggggggcggcggcccagcgcgcccatgacccgcgaggagtttctggagagggccgccgcgctcttcatcgcgaaggtcaagccggtgggctgaggcccgtgggccgcgcggatccgggatctgcgctggggggtccccgcgtgcggggcgcgcggagccttcccttcgccctggtgaggccctgccataaccaggcgcccagccctgcggaggaggccggggctcccaggaagcggacgcccggtccccacacagcgccgcggccgcccctccacccccgcgggagcccctgccccacgctaataaaatgtgttgcgaggctgacgctggtgtgtatgcgagcgcccgcctcccagccccggtgcccgcagaagacgcttttccccagcaggtcacccacggccccggaaccgcggcgactggaggctggattcgaggccggaaacgccgggacccctggacccggcctggtgggagcagcggagggggacgccccacggggccctgcggagcctgaagccggagagcaggcggctcttctggaacgcagggcccgggccctccagccccgcccggcccaggtatcctccctgagcctcagtctccccagatgtcaaatgaagaggccagctgggcagatggtagtgacattggtgagacaacagccctaacacttcccaggaactgaagtgcctcatgtgattgattcccaggcccaggcagcggaggttacaccctcagcaagggctcagctgggatctgcgcccggcctgctccagaacgcagcccactcgccaccggtggggagggtcgtccggtatcccccagtgcccaccaccaccaaccagaatcacttctcagactgcaagagcgaatccagccgggcgtggtggctcacacctgtaaccccagcactttgggaggctaaggcggcggatcacttgaggtcaggagttcaagatcagcctgaccaacatggtgaaaccctgtctctactaaaaatacgaaaaaaaaaaaaagctgggctgtggtggcaggcgcctgtaatcccagctactcaggaggctgaggcaggagaataacttgaacccaggaggcagaagtggcagtgagccgagattgagccactgcactccaatctgtgcgacagagtgagaccctgtctcaaaaacaaaacaacaacaacaaaaaaaaaacaggccagacgcagtggcccacgcctgtcatcccagcactttgggaggcagaggcaggtggataacgaggtcaggagatggagaccatcctggctaacatggtgaaaccttgtctctactaaaaatacaaaaaatgagccgggcgtggtggcgggcacctgtagtcccagctactctggaggctgaggcaggagaatggcgtgcaccgaggaggcggagcttgcagtgagccgagatcgcgccactgcactccagcctgggtgacagagcgagactccgtctcaaaaaaataaaaaaataaaaagtgaatccagaactccagctccagttgctggcaggtgacttcactcccttggcctcagtgtctcctgttaaatgggagtccccacagcctgttctggtggagggggtccaatcggacatagagaacactcaagccttgtttctcccctgctgtcaccgccacatcacagtcatccacacagaaaagacttctgtgaccacatgtgggagcgttttttcccacacaccaaccagcagacgccagccgggtgtcctcttaattcagctctgacgccttctacccagagatagtgtcagatcccacaggccgagggctcagtccccgagcctctccctcttcagacaccagttgcgaatctgggcttccaggacttcggtctggccgggttcaagttggggttcccagcacccctttgggttcaattaatttgctggagcagctcactgaactcggaaacacttgtgtttcctggtttactataaaggatgtggcaaagatagcagaagaagggaccacaggtgaggtacgtgtagggtggggattggagtgccatgaggatgcacagggcaccatctcagagcttccaggcatctccacatgttcagctcttggaagctccccagaacccagttctctagggtttcgtggttttttgtttgtttgttcatttttgagacggagtcttgctctgccacccaggctggagtgcagtggcgcaatctcggctcactgcaacctccccctcctgagttcaagcgattcttctggctca[222 bp omitted]cccaggggtatagggcaggaccctctttggggagggtcccaagacccgtaatcgaaaaggtaagattagagctctgcagcccagaggagggcgggagattatttcctgaggcctaacgagctcagcagtgcagcaaaagactgcaactagggcttcaggagctatgatccgggaactgaggaagaaaactactctctattctaacaccacacacgggaacagaattttattttattttaattttttgagacagagtctcgctctatcacccaggctggagtccagtggcgtgatctcggcttactgcaagctccgcctcctgggttcacaccattcgccattctcctgcctcagcatcccgagtagctgggactacaggtgcccaccaccacgcccagctaattttttgcatttttagtagagacggggtttcaccgtgttagccagtatggtcacgatctcctgacctcatgatccgcctgcctcggcctcccaaagtggtgggatgacaggcgtgagccaccgtgcctggccttctttttttttttagacggagtctcgctctgtcacccaagctcgagtgcagtggctcaatctcgtctcactgcaacatctgcctcccaggttcaaataattctcctgtctcagcctcctgagtagctgggatcacaggcacgtgccaccgtgcctggctaatttttgtatttttagtagagatggggtttcaccatgttggtcaggctggtcttgaactcctgaccttgtaatccacacaccttagcctcccaaagtgctgagattacaggcatgagccaccgtgtctggccgggaacagaatttttaaatttttacaagttccacgatggcagagaccactcctgtctcccagtttcccagcactgagctgggcttaggataggtgatcaatgaaccaatgaatcaatacaggaatgaatcctggcaaatcgcctgtttcccaaaaaaagccacaataatggttccactccccgccgcagaggcagatggagaggtagaatccgcatccccctgcgggactggagctccttccaaggcagggcccctgcgggacgctcaccctctggactgggcaccagctgcgatgcctgcgctgacggcagctcctgctgtgcagactcaggagctgaataaatgacagttgtggttctaggctaccaaatttggggtgattcattacgcagcaatgagtaacaaagattaatgaaaggtgcccactccatccacaggtgctgttaggctaccacaaacgccccttacaggtgtgagccttacaggtcatacgccagagcatttcagtgagcacgggccgggggctcagcagcatttccggtgagcacgggccgggggctcagcatttccggtgagcacgggccgagggctcagcagcaattccggtgagcacgggccgggggctcagcatttcagtgagcacgggccgggggctcggcatttccagtgagcacgggccgggtgctccgcagcatttccggtgagcacgggccgggggctcagcagcatttccggtgagcacgggccgggggctcagcatttccggtgagcacgggccgggggctcagcagcatttccggtgagcacgggccgggggctcagcagcatttccggtgagcacgggccgggggctcagcatttccagtgagcacgggccgggggctccgcagcatttccggtgagcacgggccgggggctcagcggcatttccggtgagcacgggccgggggctcagcggcatttccggtgagcacgggccgggggctcagcggcatttccggtgagcacgggctgggggctgagcaacaggacacaaaacacaggagagccgggcgcggtg[311 bp omitted]ccgaagcccacagccaggcaggctgaggtgggcttaaatcctggacacccggacagggacgcagggcacggaggcttccaggagtgaccaatcagaggacaccaaagctggtcccagggtgcacctcacactccgccccggtcccttgaggccaaggccgaccgaagcccacctcccctgccccgcccagctccccggggcctcccctgatccctgaccctgtgccgcccactgtgcccgccctcaggtcccgaggaccccgtctgtcctaatcccggcatgacccttaccagcgcagcccggaagctgacgcgtcctccctggcctcacagcagcatagagcgcggcaatcccctctggcagcacccacaggctcctgccccaccccacagtcccccttggaagcttcctctctctccccagctcctctggtggcttcatccagggcctcccctcctcccaacagtcctctgctggctccctggggacatcccaagcctgacacatccaagacggagcttccggccggctccctggaccccgggctcctccagagtttctggtctctgtggaagcctctcacccgatccactgagcactgagaccacggccagacgccttcccgggctccacagcggccctcaccacacctcatcctgaggcaccctgcctgccctcccttcactgcccccggctggtccagccaacaccctcgcccacctggacccccagcccttcaccgcccccggctggtccagccaacaccctcgcccacctggacccccagcccttcaccacgcccccggctggtccagccaacaccctctcccacctggacccccagcccttcaccgcccccggctggtccagccaacaccctcgcccacctggacccccagcccttcaccgcccccggctggtccagccaacaccctctcccacctggacccccagcccttcaccgcccccggctggtccagccaacaccctctcccacctggacccccagcccttcaccgcccccggctggtccagccaacaccctctcccacctggacccccagcccttcaccgcgcccccggctggtccagccaacaccctctcccacctggacccccagcccttcaccgcccccggctggtccagccaacaccctcgcccaaatggactcccagtccccaccagccagtcaaagcatccctcccccagcctcagcgatgggttcagagaaacccagctggccagtgagatgcagccgggagctgtttccgggagcgcagtgctgggcggctgggttgggtgcatgggctagactttgcagccctcacctccgccatgtctgcgaataaagccggcactcaggacagctgagcgggaggctccccagcgtcttctcacctctgtcccgcactcaccacccagaccctgggcctctagccagtcgggctgtccccacctcagggcccctggacgtgctgttccctctccctgcagcactgttcccgcagacctgcctgctgcttccccacgccacctgggtctctgcttatatgtcacctcctgagtccaagatgccttcctacaccatcccggtggctctctaacccctggcattctttagaaactgcttatttatgtatttatatgctggtttgtggcctctctccctgtgaacccaagggcaagaagtttactgcttttgttcactgctcaatccccagaacctagatttacacatagaagagaaggaagagaaggagagagggaaggagggcaagggaagggaaggggaagggaatggaagggaaggggagtggaggggaggggaggggaaaggaggggaaaggaggggaaaggaggggagggggataggaagagaggggagggggatgggaagagaggggagggggaggggaagggagcagaggggaggggaggaggaggggaggggaagggaggggaagggaagagagggggagaggaagggagggaaagaaggaagcaattttcccctaggaagaagctggaagtcattgaggtgtgttaatccctgtagctgtagtaacaaatttagtgacttagcgtggacgtaccatctcacagctctggaaggcagaacttctaaaatcgaggcatgaacagggctggtccctcctgggggctccagggagaacctgtttcctcctttcccagagtccagaggcgcccgcatccctcagctccaggcccttcctcccccttcacctccaagagcgcaacctcttccagtctctgactctcggcgcccgccccccaccgccctcttaaacggaccctgtgaggacatgggcccccatcaccccggatgctctgccgtctcagggttcttatcacacctgtagagtcccttttgccacctgaggtggtacagccacagattctggggatcaggatgtggatgtcttgggggccttattccctcttccacggtgaggaactggcccgggactgcacagaggaaagctgacctggaagcctgttctgatgcatctggaagcacacgggccccacagccttttgcgtttttcccctttttttttttttagacagggtctcgctctgtggctcaggctggagtgcagtggtaaaatcacagctcactgcagcctcaaactcctgggctcaggcgatcctcctgcctcagcctcccaagtagctgggaccacaggtatgtaccatcacacctggctgcttaagaaacatttttttttttttttttttttttttttttttttttttgtggagacgaggtctggccatgttgcccaacgccccacagctgctgtgtcctggctccctgtccctctcccctgaggaccatatcctcccacatgcacccctctgccttctgagaactgtctttcttccctacaaggcatgagagcagcaagatgccatcgtgtaagagtctcagtgacatcttgggctccacaggaagacctttgtacaactatcttatctaacccactttcaaattaaaaaactgaaagtcgggctgggcgcggtggctcatgcctgtcatcccagcagtttcagaggccgaggcaggcggatcacctgaggtcaggagttcgagaccagcctggccaacatggcgaaaccccgtcactactaaaactacaaaaattagccgagtatggtggcgcacctgtaatcccagctactcgggaggctgaggcaggagaattgcttgaacccaggaggcagagattgcaatgagccaagatcgtgtcactgcactccagcctgggcaacagagtgagactctgtctcaaaataaaataataaaataaaataaaaaactgaaactcataggccaggcacggtggctcatgtctgtaatcccagcactttgggaggccaaggagggtggatcacatgaggtcaggagttccagaccagcctggccaacatggtgaaaccccatctctactaaaaatataaaaattagctggcatggtggcacaagtcacccacttgggaggctgaggcaggaggatcacttgaacccgggaagcaaaggatgcagtgagaagagatggagccactgcgctccagcctgggtgacagagcaagacgccatctcaaaaaaaaaataattaaataaataaattaattaaataaacctgagactgggtttaatgtttgagcgatatttccaaggtcgtggcagaaactagatttgaatttaaggttcttctctgccatgtgatggaaaacctaactcaaactggcttaattaacgaagaaggaatttatttttacttatttatttatttttgagatggagtttcactcttgttgcccaggctggagtgcaatggcgtgatcttgactcaccacaacctccgcctcccaggttcaagcgattcttgggcctcaccctcccgagcagctggaattataggcatgtgccaccacgcccggctaattttgtatttttagtagagacagggtttct[131 bp omitted]gtgtgcacgtgtggtcccagctacctgggaggctgaggtgggaggactgtttgagcccaggagttcaaggccagcctgagcaacaggaacgggggcagggagggaggaaaggaaaataaactaaaaaggctgggcgtggtggctcacgcctgtaattccagtactttaagaggccaaggcaggaggatcacttgaggctgagagatcgagaccagcctggccaacatggtaaaaccccatctctactaaaaattcaaaaattagctgggtgtgacagtgcacgcttgtgatcctagctacttcggagacaggtgggaggattgcttaagcctgggaggcagaggttgcaatgagctgagattgcgccactggactccagcttgggtgacacagagagactccatctcaacacaaacgaactaagaggcaagaattcatgagcttgcatcattggaacatccaggggaggtcaggtaacagcatgatgcaggatcactaataggattatcaacgtttcccctctcatcagccggctcggctttcctgtgatgccgcctttgttcggaggccccgtggtgacaccatgaccccgtaactccagccccaggtccttccagctcagccaccccagcactgtgatcccagagaaatgtcccagagctgaatctcattggacgtcaggagtcacatgcttgttcctgaaccaatcattgcagcccagggtgggggccctgggaactgatgggatggcccctccctgcagccagggcttgcgtcagtccaattcgaacccgttcccacagagtagggagcccccaagcaggcaggtggaagcccctggtgtccaccgctcccgggtgctgtgagcctgagcctccctgggggtcggggccctgtgggaccagctggaggggcttgaaaatctccccaacccaggccgggcgcggtggctcacgcctgtaatcccaacactttgggaggccgaggcgggcggatcacgaagtcaggagatcaagaccatcctggctaacacggtgaaaccgcttctctactaaaaatacaaaaaattagcagggcgtggtggcatgcgtctgtagtcccagctactcaggaggctgaggcaggagaatcacttgaacccgggaggtggaggttgcagggagccaagatcgtgccactgcactccagcctgggcgacagagcaagactccttctcaaaaaaaaaaaaaaaaaaaaaaagcgagagaaagaaaacctccctcacccacacagtgcttcctgggatgtgggtgtacggaagaagagagatcttgggagcccttagagaaggaatcgtggttaattctaattagcattaatttacccatgagctgctgcctgccggctccatgatgctggcaatatatccacgacctgtggcacggaagagactgaggctcacaaaaccctgggaaccttggtgaaggggccacagccagaaggccccactagtcccgagaccctccttttactccaggcccccagggtgccgggcagaggggcctgagggaggaggcccagaggcccttacgggtgaggacgcctcggcctcggccctggacagctctggaagtgaccgctcggcccagagctctttcttggatccctccctccctctccactcctgatgctgttttcctttccccagacaggtttgcctgctggtcctcttccggggaccagactcatgaagccggggccaggtgttggggcacctgcgggacagagtggccctggtcccagactggtttttgtttttggttttttttttttttgagacggagtctctgtcgcccaggctggagcgcagtggcgctatctagactcactgcaagctccgcctcccgggctcacgccattctcctgcctc[135 bp omitted]gccccccaaagtgttgggatcacaggcgtgagccaccgtgcccggcctgtatgttgatgcagctgtgtgtacccagggcatagcaacaatgccactggcacagtccgagggcagggccacccgtcacgggcacgactcaggggaggctgggctgccccgtcctcaccacggccagttctcccgaccaagcttcacagcaaggagcatgtgggtgtctgggcagccactgagccaggtcagaagtcaggtggggtcacagtgatgcccggaatcagctggggtcaagactcaggtgggctgggcgcggtggctcatgcctataatcccagcatttgggaggccgacgcagacggatccctttattagtccaaactgcatcctccccttcctttcaaaacctaacaacacacttgaggtcaggggttcgagaccagcctggccaacatggtgaaaccccatctctacttaaaatacaaaattagccggacgtggtggcgggcacctgtaatctcagctactcgggaggctgaggcggacactagcttgaacccgggaggcggaggttgcagtgagattgtgccactgcactccagcctgggccacagaacgagactctgtctcatttaaaaaaaaaaaaaaaaaaaagactcgggtaggacaaaggtcaggctgggaggagggcacagccaggctcgggctcagcttggggtgggggctccgtggggctggcgcctctcccgggtcaggtgctgagccgatgctggccggcgtaggcctctttcccagtttctctggggggcaggagcaccttgccaacctctgatggctccagcgcctgcactcgcctcacaccacatggtgacttcaacggggaccagggaagccctcgcccctcccacccctcagagccctccccgacctcgcccacttctcagagctcccgctgtcgggggaaccgaggcagcgccgcgcctggaagccaggtctgcggatcccgcctcgctcccgccccttcctcccttccgcgtggccagcgcgaccctaggacagacttcgcgcccgtcccctgcacagacggggaaacggagacggggacgcggggtcgcgccggatggaccggccctgcccctccggtcccggtcaggaccccgcgccgcgccccgttcaccgcccgcggccccgccccgcgccggcacgtcacaaaacaaccccaaagccgggggaccgggccggtgacggcgcagagcagccctgcccgcctccttgcgcacagcgtccgcggtgctggtcgagcagggggcgacggcggcggcctcggggatcggaagagcccggggctgcgcgctcgaaccctccctcccggcggaggcgctcggcgccgtaggcgggaccggggccgggactccacctcccggcgtcccctgcggccgggcgcgcaggcgcaagtcggacctggccgcggagcgcaggcgcagtcggggccaggcggtgcgcgcaggcgcagcggggggcggggcgcgcgggcccggccaaggcaagcgccggtggggcggcggcgccagagctgctggagcgctcggggtccccgggcggcggcggcggcgcagaggaggaggcaggcggcggccccggtggctcccccccggacggtgcgcggcccggcccgtctcgcgaactcgcggtggtcgcgcggccccgcgctgctccgaccccgggcccctccgccgccgccatggctcggccgctagtgcccagctcgcagaaggcgctgctgctggagctcaaggggctgcaggaagagccggtcgagggattccgcgtgacactggtggacgagggcgatctatacaactgggaggtggccatcttcgggccccccaacacctactacgagggcggctacttcaaggtgagcgcggcgacccccgcccgggtcccggagcccacgagcgacctcgggcgccgggaaccagctccctgccccgcggtcctagcgctgttgctgggcgggccccgaagcctcctggcttgggctcgtttcccttctatggccacgttcccccacccagctctgcccggccccctcctcggaccgtctcggggaccttcagcctctgctgcagtcctcgaaaatccccagttcccttcaaggcatcgtccggtcccctgttaggctcttggcccccggaggggtggccgggggccctccctgtagcatctgggcgtggggctcttgcccacctcctccttggcgggggctggaccccggctgcctccccctccgcccctgcgagaaagagggagcggagcccaggccgcgccggcctttcagctgccctccccgccctccccggaggagacaaagaggcccccccagaccccgtagctgctattgttggggagctgggcccgtgagcgggggagcgaggccagcctgggggtggctggcgcggccactcgctcagtctccaacaaaggcccggatgagccttggcagccaggacccgcctggaaagcggccacccttgccagtagcagccggccaggcgccctgggctccatcccctgctttatgtaacctgcgccctcgggaaggccgaagtaggggcgtgcctcccacctgctccctgcagctctctccaggcctcccggctcgggcccgcgtcccggaccccgacctcagaagctccgggctcgctcatcccagctggtcttggcctttctcagagtccactgaacaggtggcttcttgggacccaaaccccgagttctgggccgtttcttctgccctctggcggtttaattccaagcagtttctggatgtttttgttgttgttgggagcggggaggctgtttctgtctcatgtgaaaaggactcaggccaaaaccagggcagttttcttgatctcacgatccagacgtgacctttgacttcttttagcgttcagggacctcgttcttggggccagagggacaaagcgaggggccctgtgtgagcggtggggaacgagcaccctgtccaggaatctccccctcccaccgtcacttcctgccaagagcctggacacgacacgacactgcagggcccggcccgctctgccccggccagctgcgggcgtggggccgagggaccgatgcctcccgcacgatatgtgtctgctctccgagctaattagtgtctgaaccgcacccgctcagcggctgtgagggcagcagcctggtctgctgggggcgattcctgagcagagagtgggacgcccgtgggttctgcatctggaatcctgcgtccccacacagggaacagagtttgggtctcgaggttgccaaatggttttagcagctcctccgccagccccttctgtctgcttgggggagcagctggctgaggagccgcagccccacctcgaagccaggcctgtgaggcggctgctgttctggaaggaggggatgggggtttctggctgctgtgcccaccagaccggttgccagggattgtgggcagagcttcctgggccagcattaggggataatccggttttccggatttcccagggagggggcctctagacatctgccacagggtcagtcctcagaagccagtgttgagacgggggtgctgccacccacgaggactctcccttcccgctgtgcctgggagggagttgggggagcgtggaaatacagaacctgctgagtgcccagggccgctgctgcccagccactgcctgcagctgctgttccttcaggagccaaagtgagccctggggcaggggccgccagagagagccctccacagccgacttgctgtctgcccttggcagggcgctttccttttctgagcctgggtttgctccggggaaaagacattcttagaggtgcccaaaataagaggctcattgggacttggtggggtttggtacagatgaggccttggctgttgtcaaggattgccgcctgaaacccagcaccaggcttggggggcctgaagtcttggggaaccgcaggacagttctgagactgaagttccagccttgctctgtggccgcggccaagtcacttgccttacggggcaccagtgagttccctgtcaaacagaggacaccccccaagacaccccgcgtgccctccctgtccaggaggggcccgtccacgatccaagacccccaaagtgccctgcctgtccgggaggggcctcgcccacaatccaagacccccgagtaccctccctgtccagacctcgcccacgatccaagaccccctgagtgccctccctgtccagacctcacccacgatccaagaccccctgagtgccctccctgtccagacctcgcccacaatccaagacccccgagtaccctccctgtcaaggcctcgcccacgatccaagacccccgagtgcccgccctgtccagacctcgcccacgatccaagacccccgagtgccctccctgtccagacctcgcccacgatccaagacccccgagtgccctccctgtccagacctcgcccacgatccaagacccccgagtgccctccctgtccagacctcgcccacgatccaagacccccgagtgccctccctgtccagacctcgcccatgatccaagacccccgagtgccctccctgtccagacctcgcccacgatccaagaccccctgagtgccctccctgtccagacctcgcccacgatccaagaccccctgagtgccctccctgtccaggcttccaccacgatcgctctgggggtgctgctctcgtgccttggagtgctgagtgccaccaggacccctgacccagacaacctctgtgtctggcactggggcccagcaggaaaacagtgaggcttccttgtttacctgctgtggcccaggagggccgtgggtggcatcacgccccaggctgcaggccagacagctctgtcacctggcacgtggcttcaggcctccctctgtggccgtccttgccagcagatctggacctccagggcctgggtgaccacagggggcgatgctgacagggaaggagtcctgccaggtttctgtgacctatgggtctgcctgcctgaccccccaagaccggacacctgagggcagacggccatactgactcatcccctcccacggcctgggccagggcaggtgtcacaagtgtttgctaactgagcaatcatctgtgctaaccctccccacaccctggctgccaaggccctggaggtgcagccctggtcctgggcttcagctccatccaaggggagcctggagcccctgccagtccattctgtctgctggtgggtgcccctggcctgggtcccatatgcctgacctgggctgccacgggcctggagccacgcgggcagccagtgcccacgttccccagcagttgtgctgggccgggtcccggccacctggactgtgtaggagctgggatcagctcgggtgactcagaaaaggcttcaggcagccttctggggacttgaccccaggcctgtgagagtccctgccttgggcaggatacggtgtccctcacacacaccctcaggcaccagcactgggagtgggatggccttgggcaccttgtgagctggggcaggtcttggggctgggctggactgagccacctgccttctgcccctgcaggcgcgcctcaagttccccatcgactacccatactctccaccagcctttcggttcctgaccaagatgtggcaccctaacatctacgaggtgagcgcggcccccacgggcctcaagtcctcatcctccgggacccagggtgctgggagcctcacgtcctcatccttccgggacccggggcgctgggagcctcacgtcctcgtcctccgggacccggggcgctgggagcctcacgtcctcgtccttccgggacccgaggcgctgggagcctcatgtcctcgtccttccgggacccggggcgctgggagcctcacgtcctcgtcctccacgtcctcatcctccgggacctggggcactgggagcccgtgctgacctctgacctgttctgacctgtcttcttcttgtgcagacgggggacgtgtgtatctccatcctccacccgccggtggacgacccccagagcggggagctgccctcagagaggtggaaccccacgcagaacgtcaggtaagccggcccaaccccctgtgtccacccagaacatcaggtaggccgggctccgtcccgtatccacccagaccatcaggtaggccgggctcccccacaggctgtggcgccaaggcctgattcgggacctgccagctggcggtcctgggcctcgctgtacctgcacggtaggtgctttcacggggcctgcggcaccgtgtgtcggtgcagactcccaccaggaccccaggccggccccaccgtctggaaccacctagaggtgtcccgccatcctcagtcctggggccttctccttacccagccgtctctgggttggtcacctcgtgccacgtgtgccgcctgggcctcgtccccaggtacaagcactgggccgtgttgcccgtgtgtcctggagtgtagtctaggcaggacgtgcgggtgtgagggcagccccgggtctgacggaggggtctgcaccttgctgccctccctggtcttggcgtgggagggaggagactgatgcaggtccagcccctgctgttctgggggcctgagacagaagcagaggccatgaggccaggtgaaggtcacctgctgggtgggtccaggcgtccccgtgaccctcagggccagagaagagccggaaggctggggtgccccgggccgccccactccgacccactctccccacaggaccattctcctgagtgtgatctccctcctgaacgagcccaacaccttctcgcccgcaaacgtggacgcctccgtgatgtacaggaagtggaaagagagcaaggggaaggatcgggagtacacagacatcatccggtgagggcgggcgggggcgtcacgggaggagagactcagatccggcctgcaccccggcccctggtcccacggccgcccagccccaccttcctggtgagggtggcggagcttcctggtgcccatttacagggtgccagtcacagatggaggccgggccgagtggcggagggtccagccaggttcaagcccagcttcttgccccttttcctctttttttttgtttgagacagagtctctctctgtcacccaggctggagtgcagtggcgcgatctcggctcactgcaagctccgcctcccgggttcacgccattctcctgcctc[176 bp omitted]ccggcctttttttttttttttttttttggagacagagttatactctcttgcctaggctgcagtgcagtggtgcgatctcggctcactgcagcctccactactcgggttggagcagttctcccccttcatcctgccaagcagctgggattacaggtgcccactaccacgccgagctaatttttgtaatttttagtaga[137 bp omitted]tcttccaggcttttcagtttaacgcatgtctgtgctttaatgaagaaatggggtcgtgctgtgtgtgcccagtgactgactgttagggaacatgtgtctgtgccttaatgaagaaatggggtcgtgctgtgtgtgcccagtgactgactgttagggaacatgtgtctgtgctttaatgaaaaaatggggtcgtgctgtgtgtgcccagtgactgactgttagtcaggggtgttggccttactcatgtctggagtgcgtccctgcaggctcttggcctggtgagctctgggtacagctgtgcagtcgcctaccggcgccttctgtacctgcagtccacttagcttgcgtggctgtgtgtggtgacccacggctctccctctcctcccatcgccctcatgccccagagctgagccccacagccccttctcttgggtgcctgtgttcacatgaatgtgtaaacacgtgcgtgtctgtgtacaaagacaaggctttctttacgggttgacggccttaatggttcctgctcttcctgttacatagaggcccttcctatccattttttttttttctcagagtgatattgcatagatttcctcacagaggcctcacctatttttgttggtattttgtataaacagaatcttaaaaacaacttttaaaatattgcacacataatgcatgtgtcttcctcgccccaggacccaggagcatccagggcaccttccatcctgcactcgctggtacctggtgtcgtggggtcatctcggggcagcatcctggtgctgggcggtctcggctctgagcagccatggtgggcgggccccgtgcggcctcctgggaagtggcctgcaagcacctgctggcctctggaggtcacagggtagctgccctggccgtccctctggtgcagatgtcctcggtggccccggtccggtcgtgtcacctggcccaggtggctggctccttggcccggttcttcccggccacctccctgaggcaccacctccttgagatcccagcacagaaataaaagccacactatttttatccctcaaaactccctgtgggccaacacacatgtgccatgtggactctgctgtggtcgccgtttctgcctgttttttcatctgtgtgcgtgttggcctcgtggcagcccaagtcccgctgagctgtgtcgggcaggctgccgtggagcccggcttggtcagggatgttggtcttgctgaacaggacctccagaccgtcctccagctcatgctggcggtgtgccggcggcacctccacggtgcaggtcagttcccaccctggccctcccctgcgtctccccacagccgccacctctgcggtgccgtccccggggcaccgtcacccccccagcccgtccaccctggccctcccctgcgtctccccactgctgccacccgtgcagtgccgtccccggggcactgtcagtcacccccccagcccatcggagagcttggaaagcaaagcttggcgtccgctgggtcccgccacccagggacgtccctgaggccagacgcctgccctccacgcgtcatgcatccccataaaaagcactgggcttgtgggctgggcttggggctgtctgtctgctccctggtgccctcccatgcgggcactgtgggacccgcacaccctggtagcagccagccccagagcccagagccgtgcctggtcggtgataggggctcgagcccattgcctgcggctgcagcctcgttcctgttttctgtcaaatggggtcagcgtgccgcctggccctgctgtgccacccccggaagcccctttgcttccagtcctggggggacattcttgacgcgtgtcctggaggtggagccgggggcaggttcctcgtaggtcctggtgtgcgcggtgcagcccctcatagggccgggtgtacacggtgccctccaggaagtttgagctaacttgtcctcccttcctgccagaggctgggatggccaggccccccaggtttagaatccggaggccggggtggccaggcccccaggtttagaatccggaggccggggtggccaggccccccacgtttagaatccggaggccggggtggccaggccccccaggtttagaatccggaggccggggtggccaggccccccacgtttagaatccggaggccggggtggccaggccccccgggtttagaatccggaggccggggtggccaggccccccgggtttagaatccggaggccggggtggccaggccccccgggtttagaatccggaggccggggtggccaggccccccggtttagaatccggaggccggggtggccaggccccccgggtttagaatccggaggccggggtggccaggccccccgggtttagaatccggaggccggggtggccaggccccccgggtttagaatccggaggccggggtggccaggccccccgggtttagaatccggaggccggggtggccaggccccccgggtttagaatccggaggccggggtggccaggccccccgggtttagaatccggaggccggggtggccaggccccccgggtttagaatccggaggccggggtggccaggccccccgggtttagaatccggaggccggggtggccaggccccccgggtttagaatccggaggccggggtggccaggccccccgggtttagaatccggaggccggggtggccaggccccccacgtttagaatccggaggccggggtggccaggcccccgggtttagaatccggaggctgggatggccaggcccccgggtttagaatccagaggctgggatggccaggccccccggtttagaatccggaggccggggtggccaggcccccgggtttagaatcctgctgaggccacggagaggctcaggccgtttttgcgtttcccatctcacctgtgctggttcccgtctccagggatggtcctgcctcctgtccttgggccctcccagctgcttcctttgctcctgcgctgaggaaggcttttgccccccagtggggcagcatgggccctccctgttgccggcatcgttattttctcccagctcctgatgggtcccttgggttgtgcttcggggcggggcaggcgggtgtgactgcactgcgcccgtccagcctcccacccgcacctcctgcccttcccgagccccctcctctgtcatttctccccctggagttcctcacgcacagggctttgtcctaagtggtcgccacacgccgttttaagagaaacctgagcgttggggtgagcgtcggacctgggggaggggggccgggcaggggccgagtccaggcacgtgggtggcgccctcacccaccctgtccccccaggaagcaggtcctggggaccaaggtggacgcggagcgtgacggcgtgaaggtgcccaccacgctggccgagtactgcgtgaagaccaaggcgccggcgcccgacgagggctcagacctcttctacgacgactactacgaggacggcgaggtggaggaggaggccgacagctgcttcggggacgatgaggatgactctggcacggaggagtcctgacaccaccagaataaacttgccgagtttacctcactagggccggacccgtggctccttagacgacagactacctcacggaggttttgtgctggtccccgtctcctctggttgtttcgttttggctttttctccctccccatgtctgttctgggttttcacgtgcttcagagaagaggggctgccccaccgccactcacgtcactcggggctcggtggacgggcccagggtgggagcggccggcccacctgtcccctcgggaggggagctgagcccgacttctaccggggtcccccagcttccggactggccgcaccccggaggagccacgggggcgctgctgggaacgtgggcggggggccgtttcctgacactaccagcctgggaggcccaggtgtagcggtccgaggggcccggtcctgcctgtcagctccaggtcctggagccacgtccagcacagagtggacggattcaccgtggccgactcttttccctgctttggtttgtttgaaatctaaataaaactactttatgagaggccagagaagctgtgcttgggagggagaggcagcctccacgtccatgagtgactgcacacggccagtcccactgggaccctggctacgccaggtgtggatctgggaggcctgtcctgggaggcacggggagcagccgggtcccgcggcctgtacgttcccatgacttgggtcagacaggcctgggcagcatcccccagcctgcgggacaggggcggccagaaagcccccagagttcctcctccctgtgaccaggtgcatctagtgggacgggagctgcctctgcaggcatccagcaaagcttcgtcgcgggtccacagccgcctgggcgttgatctcagcgtctcagggctcccaggaccacagatgcccccgatcagcactccggcggctccagctccgtccaggcacaccctcggggtggggagccgtggccctgggcacacagggcaggcacctcacgtcctggtgtcaggaagtccccagcatcgttttattacatgtcatggaggaaagctcggagctcccatgccctcccggggcaccgccttccaggaacctgcctgcgttccgcttctgggcacccggaaagtcgctcagtggctgattcagggtcgaggagctgtgaggatgaggtttcccaccaagttgggacagaaaatggggccctggggtctcagcaaaccatggccctcgggaccaaacctggcgtccgcccctattgtgagtgaagtgttactggcacagccacacccaggtctcaggatcatccatagctgcttggtttggtttggttttgtttttgagacacagtcttgtgttgcccaggctggagtgcagtggtgcgatctcgcctcctgggttcaagtgattctcctgcctcagcctcctgagtagctgggactacaggctcccaccaccatgcccagctgatttttgtatttttagtagagatgggg[143 bp omitted]cacccaggctgaagagcagtggtgcaattacggctcactgcagccccaacctgggctcaagcgatcctcctgccccagtctctcaaagtgctgggattacaggtgtgagccaccgccttcggccagtgtctttattcatgaagaccaaaaactagaacagcgcaaatatccgtccgctggtgaatgcataaacacagcgtggtccagccacacaatgggatgtgacacagccacaaaaaggagcgaggctctgacacaggccacagcctggatgcaccttgaggacgtcatgctgggagagacgccaacgcaacaggtcctgtgtgattccactcctgggaggtccctagagaccaattcagaggcaggaagtagtggccgggcgcggtggctcatgcctgtaatcccagcactgggaggccgaggtgggtggatcacctgaggtcgggagtttgagaccagcctggtcaacatggtgaaacctcgtctctactaagaatacgaaaattagccgggcgtggtggtgggcacctgtagtcccactactcgggaggctgaggccggagta[131 bp omitted]gatggtagtgtggcttcatctcgagtcctctttgagaaacactttctaaaatgctcaaggatggagggtggagggtgtgcagcggtgggcggggctgtgaccgtcacctcacctcccccacaggaagcgcgtgtggggaggctcggggccggggccagcacccacactgggtctccacagcggcatggaggcctgcgtgtcttcactgctggtgctggccctgggggccctgtcagtaggtgagtgggagccgggatgcaggggggacactgaggcccagcgctctcggtgggtccctggatgggaggggtgggcgcgggcgccgacatcctgggtgtaagagcggagattcatccttgtttggagggggactgaggcctggggcatcccgagctcctcacgcttcaccccgagtggacatcccgggaccgtgggagagtgtggtgtccaccggctcacctcgcccatcctcccggcagcagccagaaggcaggggtcacgctcacacccgaggtgcagagtaggagactgagacttggcgaaggagatgctgacctaggactgcccagctgggagggcagagctgggactcgatccccgctggctgcctgccaccaccaagggcttggctgggactaggtgcccagcagtgagggagaagggaggtgggtggcggctcccctgcattccagctggactgagtgacaggggctcttgatgagttggggacccaagaagatggacagaggtaggaatccagccgtcagtcatcatcatccttcctcccatttttatttccttccacccatgggtccatcatccctccctccctccctccctccctccctcatctccccttccttccctctacccgtccgtccacccatcattcctccttccattcttccacccacccatccatcatccatccctctacccatgggtccatcatccatccctccctccctcctttcgttcccccttccttccctccgccagtccatccacccatcattcctccttcctcccattcttccacccacccgtccatccatcatccatccctcctttcaacctccctccttccctccacccgtcatccttccctccctccttccatgtatccacccatccatccatcatgcctctctcttcctttcccccctccttccctcctccctcccatccatccatcatccattcctccttccatccctccttcctttctcccgtgcttctgtgtatccatccgtatttgcagggctcgtgctgttctaggcctgccctcctgtctgactggaagagacaggccaggcatgagactgtgcagagcggaggaaacacggagggcaagagggcgggtggggggccgttgcaggagacgagcataaaccaagggaggaagccggtgggggaaaggtacgcaggcagctaagtgagacagacaaaggcccagggtgcaggcagcttgcaggcacagctagacttgcactcttgtcacccaggctggagtgcgatggtgccatctcggctcactgcagcctccgcctcctggtttcaagcgattctcctgcctcagcctcccgagtagctgggattacaggcgcctgccaccatgccgggctaattttgtatttttagtagagacagggtttccccgtgttggtcaggctggtctcaaactcccaacctcaggtgatccgcctgcctcggcctcccaaagcgctgggattacaggcgtgagccaccgcgcccggcctattttttttttttaagatggagttctgctattcttgcccaggctggagtgcaatggcacgatctcggctcaccacaacctctgcctcccgggttcaagcgattctcctgtctc[227 bp omitted]caggctgatctccaactcctgacctcaggctgtctgcccaccttgacctcccaaagtgctgggattataggcgtgagccactgcaccggcccgcaagcggggacttgattttcaaagcatgatggggattcagagaagattttgagctgatttacgttacattatgaaatcaatccttttatatttatgattgatttaaaataatttttgtacagctttattaggaaattatgcactatacaatttacttatttaaagactacatttcttgctgggcacagtggctcacgcctgtcatcccagcactttgggaggccaaggagggtggatcacctgaggttaggtgtttgaggccagcctggccaacacggcgaaaccctgtcgctactaaaaatacaaaaaaattagccggacgtggtgatgcgcttctgtaatcccagctactcgggaggctgaggcaggagaatcgcttgaacccaggaggcagaggttgcagtgagctgagatcacggcactgcattccaggctgggtaacagagtgagactccatctcaaaaaaaaaaaaaaaatggccaggtgcagtggctcatacctgtaatcccagcactttgggaggctgagatgggtggatcacaaggtcaggagttcgagaccagcctggctaacatggtgaaaccccatctgtactaaaaatacaaaaattatccaggcgtggtggcaggtgcctgtagtcccagctactcgggagactgagtcaggagaatggcatgaacccaggaggcggagcttgcagtgagccgagatcgtgccattgcactccagcctgggtgacagagcgagactctgtctcaaaaaaaaagaaaaaaaaagttttttttaagagactgggtcttgctgtgtcgcccaggctggtctcgaactcctggcctcaagtgatcctccctcctcagcctcccgaagtgctgggatcacaggggtgagccacccacatccggcctgatgtgcgttttgaaggactcctgtggctgtggggcccagtggggcctggggaggtcctggagaggggattgggaggtggcctggggggaacatgatgggggtgatgagagggggatgggagggatgaagggcagcccacacgtatcagcctaaaagtttcggggaacactggggacttcattaggatggcacatctgcttggggtcctgggcctctgagctgggcaaggacagtcgcagcaggcagcaggggcatgtagccccaacctggctctttgtcccccatcctggcaggcagctcctttgggacccagatcatcgggggccgggaggtgatcccccactcgcgcccgtacatggcctcactgcagagaaatggctcccacctgtgcgggggtgtcctggtgcacccaaagtgggtgctgacggctgcccactgcctggcccagcggtgagtaccctgccctgcccaccccaggggtccggggaatccatccgacggcgcccattctctgcagggggtgggctctgggagatttaggcccattgtgggacccccgtcccctcccggtgacgacttaggcaggtttaagtgacctgcggctgtgggactcctggagaaggtttactccttgcaagaggcactggcagggccagctccttccacaccgcagcctgggtcagagcctggctcctttcacggctgagccacagtcctggtgtggacagagtgcattgtgtctgtccattcacctgctgatggacccaacttaggcgggggcttctgctataaggaaggagggtcaggtgggggtgtttgccacctgtggccaggaggtcgaagccggccttcgagagtggctcgggaatcgacctggttcccggggatcaggaagccgctaaatgacccatcatggagttgccctacctcaggactggtccgtcatacagagcccagatcaagatggtcaaagtaacaaaaagggatctgccggcttgtgtaactgcaaagtctaggaggaggcctggcttcaggtgcggcttgatccaggtgctcacaggaggcgctgtggagcccatctgtctcccagctctgctgcactaccaggaagcctgtctcacaaggtggaaagattgaccctcctcagtcccatggaaagagggcttggctctctaaagttggggcacacttaggaggattggcatgtgtcaacccctgtacaaatcactgtggttgagcctggggccccaagtgaagggaattcccagggctggttttcgtgaagctgtaggcttggggttggatttttggacacacagcccttgcctggggccagggccgggcagaagtctggggcaggggtgagagcagggagggcttcctggaggaggtgggttgcaaagacacagggaaggactggccaagccaaggcctgtgaggggcagcggctgtgagtgatggccatggacaacgggcacagtgggggccgggactgcatgtggcgggtcgtccacgccgggccaggccgcagcaccctgattccctctgtccccaggatggcccagctgaggctggtgctggggctccacaccctggacagccccggtctcaccttccacatcaaggcagccatccagcaccctcgctacaagcccgtccctgccctggagaacgacctcgcgctgcttcaggtgtgcagggacgggacagggagaactgggcaccctcctgtcccccacgggtgcccctcacccccactgcgccctccccccgctgccgaccctccccccgcactgctgcccctccccccgcactactgccccctcccccattgcccaccctccccccactgccacccctccccccgctgccgccccccgcccccgcactctcaccccctccccctgctcacctgccccttcctgtcactcgtagctggacgggaaagtgaagcccagccggaccatccggccgttggccctgcccagtaagcgccaggtggtggcagcagggactcggtgcagcatggccggctgggggctgacccaccagggcgggcgcctgtcccgggtgctgcgggagctggacctccaagtgctggacacccgcatgtgtaacaacagccgcttctggaacggcagcctctcccccagcatggtctgcctggcggccgactccaaggaccaggctccctgcaaggtgaggggcgcccgggtggggctgggggaatgaggctggcgggagggccggggccagggcagccgccgggcaggttcctggctctcccgttctctggggagtcctgtcaggggctggggggcggggaagcactggcaggggtcccgtttctcaggtgcagaaactgaggctcagacaggtttagcaacctgcgcaagaccacacagccgggaagcggcagagctgtgacttctgctccagccaagacggtccggcgggggaagaaggagcagggttcacagggccagcgggagatggggaggggacacgcgtgggccgggagcagcccctgtgtctccttgagcctggggataacaggcctggccctgctcccctcggcgggccctgctcccctcgtcccctcagcaggtgcagaggctgagctgcggtgtgtcgtccctgcagggtgactcgggcgggcccctggtgtgtggcaaaggccgggtgttggccagagtcctgtccttcagctccagggtctgcactgacatcttcaagcctcccgtggccaccgctgtggcgccttacgtgtcctggatcaggaaggtcaccggccgatcggcctgatgccctggggtgatggggaccccctcgctgtctccacaggacccttcccctccaggggtgcagtggggtgggtgaggacgggtgggagggacagggagggaccaataaatcataatgaagaaacgctcagagcccgcctgagtcccagcccacctctgtccatgctggctgtggggcttccgacaaacctgtttccctcagcctcccgagtaactgggtctacaggcgcccgccaccacgccaggctaacttttggtatttttagtagagaaggggttt[144 bp omitted]tcccaggagggggcggcgttggccaggactggagcggtggccgggtctgcaggctggcaggggtgggcggccgtcctccccgcgtggctcctggggctgggccttgaacagcatcccaggatcttcttttttagtaacagcttttatcaagttacaactcacatagcagatgagtctccctgtaaactgcgattcaggggcctttggtacctgcacagagctgggcaaccaccaccgtgacatgtcaccccagcaccccgaaaacaggcccgtccccagtcaccccagcaccccgaaaacaggcccgtccccagtcaccccagcaccccgaaaacaggcccgtccccagtcaccccagcaccccgaaaacaggcccgtccccagtcaccccagcaccccgaaaacaggcctgtcccctgtcaccccagcaccctgaaaacagtcctgtcaccccagcaccccgaaaacagccctgtccccactgtcaccccagcaccccgaaaacaggcctgtccccactgtcaccccagcaccccgaaaacaggcccgtccccactgtcaccccagcaccccgaaaacaggcctgtcaccccagcaccccgaaaacaggcctgtccccctgtcaccccagcaccccgaaaacaggcctgtccccactgtcaccccagcaccccgaaaacagccctgtccccactgtcaccccagcaccccgaaaacaggcccgtccccactgtcatcccagcagcccgaaaacaggcctgtccccactgtcaccccagcagcccgaaaacaggccccatctctatcaccccagcaccccaaaaggaagccccacccccattgtcattccagcaccccgaaaatagactctgtccccactgtcaccccagcaccccaaaaggaggctcgtccccatcggccgtcactccccgtccccaccccagccccggtgccctcacatcccctccctgtctctggatgggcctgtgctgacatttcatggacaggggatcacgctgcgtggccttctgtgtctggcgtctcccgctgagcgtgacgtcctcaagctgcacccgcgcgctggctgggtccgagccgtgctcctgctccggggggtcgagctccagctcgaggggggcctcgctgcgtttgtgggtgcgtccctgggtgcacatctgggcggcttcgtctgcgtccgtccgtctgaagctttgctgggagccgcctgtgtgcgttttcgtgtggacctacctgctccttcctccctccagattagacccgtgggagtggcatctcgggctgttcagtgactctgtttcagcgccgcgctgttttcctgcagaatcttttaatttcactaccaactctttctttcttttcttttctttcttccctttcttccccttcttctctttccctcccttccccttcttctctttccctcccttccccttctctcccctcccctcccctcctctctctttctttctttcctttctttcctttcttccccgtctccccttcccctcccctcccctctcctcccctcccctctcctcccctcctctctttctttctttctttctttcttttcttttctttttttcttttattttcctttcttttcttctgatggagtctcagtgcgtcacccgggctggagtgcagtggcacgatctcggctcactgcaagccatctcaggttcaagcgatgcttgtgtctcagccacctgagtagctgagggatcacagacgtgcaccaccacgcccagctaactttttttgtatttttagtagagactaatagaaacacaggtttcaccacgttgaccaggctggtcttgaactcctgacctcaggtgacccgcccacctcgccctcccaaagtgctgggattacaggcatgagccactgtgcccacgttaatggttttttattattttattttatttttagacagttcccactctgttgcccaggctggagtgcagcctcagcctcccaagtagctggaatcataggggtccaccaccaagcccagctaatttttttggatttttactagagacggggtttcaccatattggtcaggctggtctcgaactcctgacctcaaataatccacccgcctcggcttcccaaagtgctgggattacaggtatgagccactgtgcccggccgggttagtgttgtaatagacttaatttttaaaaccatttttggtctgcaggagatgtgtggcggctgtatccacagggtcccccgcgtccccgcccccaggctcctggccgctcccctctccagtcagcaggagtcacggctgacgaactcacatgaatgcgtgattaactactaaggacctactcttggctcggatttcctcagtttcccctaatgtctcttcctgcacagggtcccacccgggaccgaacctgccgtttcgccgcagcctctcctcggcacccccaggctccgaccgtttctcagaactccgtgtctggaggccggctggacgggatttatgtagattacgggtgtggaccactgcacccgccagctatctcatgtttttctctcgattggactggagtcacagtgtttttgggagaggcaagtgcatttttaatctttaacttttttaatttttttatgttatttttttagagactcctgggctccagcaatcctcccacctcagcctcctaaaggattacaggtgtgagccaccgcgcccggcctaatctttaactttttatggcatcattggcagtggaaggttctcaggtcacaagtgaagagcctcataactcacaaaccaggcacgcccctgttcccggcacctgggtccagacacaaccccctgccccgaagcccctccttagccaagtacccaagtccagtctcttttttttttttttgagattcgagtctcgctctgtcccccaggctggagtgcagtggtgcaatctcggctcactgcaagctccacctcctgggttcacgccattctcctgcctcagcctccccagtagctgggactacaggcgcccgccacca[175 bp omitted]ccctg[136 bp omitted]ctgcctc[134 bp omitted]gtctcccaaagtactgggatgacaggggtgaggcaccacgcccagcccctttgggtttttaaattgttcattcatggccaggcatggtggctcgcgccggtaatcccagcacatcgggaggctgaggcgggcggatcacgaggtcaggagttcaagatcggcctggccaacatggtgaaaccctgtctctacgaaaattacaaaaaaaattagctgggcatggtggtgggcacctataatcccagctacttgggaggctgaggcaggagaatcacttcaagccgggaaagggaggttgcagggagctgagatcacaccactgcactctagcctgggcgacaagagcgagactccgtctcagaaaaaaaaaaacaaaaaaaccataaataaaaaattttttaaaaaatgataaatgtttgcaactctagctatgttaatgtctgatcagcacacattgtatgtattgaaacgtcactatgtaccccatgaatatgtacaattattatgtgttctttttttttttgagacagagtattttgctcttgttgcccaggttggagtgcagtggcacgatctcggctcaccgcaacctccgcctcccagattcaagcgattcccctgcctcagcctcccgagtagctgggattacaggcacccgccaccacgcccggctactgtttgtatttttagtagagacggggtttcgccatgttggccacgctggtctcaagctcctgatgtcgtgatccgcccgcctcagcctcccaaggtgctgggattacaggcgtgagccaccgcgcccg[226 bp omitted]cctcttggcaatgaaagctgcccggggcagccctctccctcttcctggtgcaggtgtgttgccagcgtggatgtccttcgtggacgtgaacttattttacaaaagagcacttgtccagagctagtcctgagcctgcggtttctgggagtcaccagctcgaacgacgcaggacaagtacactttggggtggcacgtcctggtgctgttattttggggtggggtgtccttccgtggtacggctggaccacgttgcctctgtccactcactgccctcgagggatgggtgagctgtttccacctttggctgccgtgacctgggctgctgtgaacttcgcagacgtttgtgtttctttcccgcacggaaacttggacagaagctccttgtcacgtcccacagtcacacggcccctgcacgtgcttaaaagaagctgtggtgtttttttttttgttttttttttttttgttgttgttgtttgcttttttttttgagacggagtctctgtttccaggctggagtgcagtggcgcaatctcggctcactgcaacctcctcctcccgggttcaagtgattctcctgcctcagcctcccgagtaggtgagattacaggcacccaccaccacgcccggctaatttttgtattttcagtagagatggggtttcaccatgttggtcaggctggtctcgaactcctgacctcaggtgatccacccgcttcggcctcccaaagtgctgggatgacaggtgtaagccaccgtacccagcggaagctgcgattttccttattccttgacatcctcaagggagaccctgatgtagaggcagggaggctaggaaggaggaagcatccagcccagtggggtggacccgtcagaaatgctcagaggcggccgtgcatggtggctcacacctgtcatcccagcattttgggaggccgaggcgggcggatcacctgaggtcgggagttccagatcagcctggccaacacagagaaaccccgtctctactaaaaatacaatgttagccgggcgtggtggcgcatgcctgtaatcccagctactggggaggctgaggcaggagaatcgcttgaacccgggaggcggaggttgcagtgagccaagattgcgccactgcactccagcctgggcgacaagagcaaaaaactccatctcaaaaaaacaaacaaaaaaatgctcagaggcaagggttgagcttcctctccagcctcctccagaggtcacagggcaccgccccaccccacccaccccacccactgggtcctggggtgactccaactggacagagatcagtggaggccaggccaggctggtgtttggtgagctggagccacgccccggggagagagctaatctctgagcccggacgtgcctcatcagtggttccctcctgctgtgctgagatgtccccaccccagccccggtgagtgactggggacttagagacacagaaccagccaccagcaggaggctgacaccctgtgtgggacacgcagtgccctggaagcctccacccctccgtctgtgttttcgtggttttttttttttgagacagggtcacccaggctgcagcgcagtggtgcaatcctagctcactgcagcctcaaactgctgggctcaagcaatccccttccctcagcctcctgaggagatggggctacacgtgtgcaccaccacgcctggctaatgtttgtaattttgccgagatggggtctcagtatgttgcttaatggagtctcaaagtcctaggctcaagtgatcctcccgcctcgacctcccaaagcgctgggatgacaggtgtgagccactgcgccctgccagccctcgctggttcctcctggtgtaaaagggaacagccgagtgagcatctccgggtggccggtgggcagagctctggtctcaggtggtttaaactggacaggtgtcacccgggagcttgacagtgacgtgggaccacatgctgggtgacttaaacaacagaaggcagcccctccccgtcctggggcccggagtctgaggtcaaggtgtgggcaggcgccgctctctgagaggccccacggaggagtcctcctgccttctccagctccgggggcgccaggcgtccttggcttgtgtccacattgctgcagtctctgcctctgtccccgcagggacgtctccccatgtctcagtccaaatgtccctcttctgatgaggatgccagccattgcctcagggccacccttacaactttatcctaactacctctgccaaataaggccacattctgaggttctgggtgggcgtgagttttggggggcaccgttctccctgggaagacgcagacgcttgtcgtcccgtggtaaatgccagaaggcctcatctgatgcccacgtacgccctgaggtggggaagctgctgtcctcatccttgctgagcgtggggccccaggattctcaggcagctggatgagcctgtggagaggccggtgcccaggctcggtcccagaacaaagcgcagaggcacgatggtcgctgacaaagtgggggccccgggaccccaaacagaaaggtccacaaaggctgaggtcggggcaggggaatttgattcaagagacattttcagccatacggcccttctcgaatttttttttttgagacagtctcgctctgtcacccaggctggagtgcagtggcgcaatctcagctcactgcaacctctgcctcctgggttcaagcaattctcctgcctcagcctcccgagtagctgggactacaggcgcccgccaccacgcccactaattttatatttttagtagagacggagtttcaccatgttggccaggctggtctcaggtgatccacccgccttggcctcccaaagttctgggattacaggcatgagccactgtgcctggcctttttttctcttttttgagatggagtctctctctgttgcccaggctggagtgcagtggtgcagctgactgcaacctccgcctcccaggttcaagcgattctcctgcctcagccttccgagtatctaggattacaggcacgcaccaccgcacctggctaatttttgtatttttagtagagacggcgtttcac[142 bp omitted]tcacaa[138 bp omitted]aaccctgtctctactaaaaatacaaaaaattagccgggcgtggtggcgggcgcctgtagtcccagctactcgggaggctgaggcaggagaatggcgtgaacccgggaggcagaggttgcagtgaacagagatcacaccactgctctccagcc[145 bp omitted]accctgtctctactaaaaatacaaagaattagccaggcgtggtggcgggcgcctgtagtcccagctactcgggaggctgaggcaggagaatcgcttgaacccaggaggcggagcttgcagtgagccgagatcatccagcctgggtgacagagcgagactctgcctcaaaaaaaataaaataaaataaactctgaaatttaaattaactgggtatttttatttgctaaatgaggccctacagggggtggtcctgaagaccctctccttggcagataaaagaggactgggatcttcttgcttctggggccagaactgagcagagcaggctcgggggttttgggtcgggggcaagggggtccctggctctgcctgagggtcagggaaggctttccagggaagggaccaggaaacagggtgttgaaggcggccacaggctttattttgtaaacaaagaccaagttcccaggagaactgacctcaggccagattggggccttgccaggggagggctgcggagggggcaggaattgggccaggccctgtggttgtttacaaccctggaggggctttgaaggcagctggccctgctgggcctcatccgcgtctgtgtcctcgttctgcacgtagcttcagaccctccccctccaccccccgcccccatgaggactttccaagcctgtggccccccaggtgggagctctttggcaccggtggttctgaggctccaagtcccctgatccgaagccatccccgagagggggtctcccagagtgggaagcgggggtctcccagagtgaagccctcagccccgtccaggccctcggcccccagcatcttcccaccctggctgggcccagccttcgccctggatggggttttctgcccctgcccaccgtgtgctggcccctcggttacgcacatcaccctatttatttatttagagacggagttttgctcttgttcctcaggatggagtgcagtggtgcgatcttggctcactgcaacctccgtctcccaggttcaaaggattctcctgcctcagcctcttaagtagctgggactacaggagcccgccaccaggcccggctaattttgtatttttagtagagacggggtttctccatgttggtcaggctggtctcgaactcccagcctcaggtgatccgcccgcctcggcctccgaaagtgctgggatgacaggcgtgagtcaccgcgcctcatcccctcctcagccccccagcacccacacgtcccctccctgtctctgtggatgggcctgtcctggacatttcatagacatgggatcacacagtgtgtgtccttctgtgtctggcgtctctcactgagtgcgacttcctcaaggtgcatccgcgccgtgggctgcgtccgagcctcgctcctgttcacggctgagtcgtgtcccattgcgtggatgggccatgctg[236 bp omitted]cggcctcccaaaagcaaccattttatttgtataactgtgtccaaattgttagaaataagtgctgggtcccgcaaagagaaaccagcccttagaaacctatttcccagcgagacaactttactatacagaatggggctgccccggagctcacgggacgaaggaaggaaggagcttctgttcccccgctggctggggctggacgccctcatctaagctcatcccggttggctaagacttaaaactgtctccaaatcgggtaaaggcaagatttgcgagaagaggagggctagggggaagaagggggtagggttgattgacaacttatgacctggaagttgagttttgtaagaggaatttggttgtctcaacaatttac[140 bp omitted]ttctcctgcctcagcctcccgagtagctgggactacaggcgcccaccgctacgcc[181 bp omitted]gctctgttgcccaggctggagtgcagtggcgcaatctcggctcactgcaacctccgcctcctgggttcaagcgattctcatgtctcagcctcctgagtagctgggattacaggcacgtgccaccaaacccagcttatttttgtattttggtagagatggggttt[132 bp omitted]ttgttcttcttgatcgtctaggaacaagagcttatcggaatacagagcaggagaggtaggggaggtttttgtgagagctgcttctgtgagtctttgggttaacccgcgaatacaaaggtatgacacagcagcccacaggatgagtcctcctgtagcaattgcgagggaggtaaagattgaggtcagcccgggcgcggtggctcacgcctgtcatcccagcacttcgggaggccaaggcgggtggatcacaaggtcaggagtttgagaccagcctggccaacatggtgaaaccccgtctactaaaaatacaaaaaaattagccgggcgtggtggcaggtgcgtgtaatcccagctacttgggaggccgaggcgggagaatcacttgaacccaggaggcggaggttgcagtgagccaagatcatgccattgcactccagcctgggcgacagaacgagactgtgtctcaaaaaataaaaataaaaatgaagaaaagaacaaaaaaaagattgatgttatgagtcccttccattttccaaaccacctttccatcagtcccatcaaggggccatctattccagagtttatggctaattcatttgttaggtcggtaaggccctgtcaggctttcgagatggtcccatcagggcctgtattatctgggatcgaagtaacgatgcgctttatttatttatttatttttttgaaacggagtttcgctcttgtagcccaggctggagtgcaatggcgtgatcttggctcactgcaacctccgcctcccaggttcaagcaattctcctgcctc[135 bp omitted]gcctcccgaagtgctaggatgacaggcgtgagccaccacgcccggccggtttgtgactattttctctaactttacctaatgtttccctttaatatttctgccaccatcctgagcgaatttcaacagggaatggcaccccagggtaccggttactacaagggctgggccaaggattttcttcagaagaggctgtctttggctgtggatatctttacggggtatatgaaccagacaggcatcaaacgaaactagctggggaaagggtgatcaccttatattgataataagacgtccttgggcggctacagggagaaggaagagacagattaaacctttttgaatgttaatttggaaggcgttgatcctggagtgaaggtccaagatccctccagggatggggccctttccgaccgtcatcttggtggtcaggagcacccgataaagtccttcccaggttggctgagtttttcctctttccaacttctgacaaggaggtgatccccaggctggtgtcggtgaactgggaattcgaggggtggaggccttgggtccggagggaggaaagggtggaagacaaaccacacatatagtttttgagaaactgatcttttgtttcaaatgtaggaaggtcagtagtggaagtcagataaggtagcccatagagcatctcataagggaacagg[131 bp omitted]attctcctgcctc[219 bp omitted]tctgtgcgtggtaaccaggtttccaagattaattcggttaggtggtttttttagagtttgattcattctttctaccctccctgatgagggtggatgccagggaaatattcccatttcattcctagtgctggggttagccccgtaatgatgtgtgcagtgaagggggtccccttgtccgaatccacgttctctattagtgcaaacctgggtgtgacgtgttcccacaggcctctgactacattgctggctgttgcgctcgggaagggggtggcctctacccagtgggtgagatggttgactgttcccagtaaatgtttgaggtgggctattgggggcatttcagtgtagtcaacccaaacactttggaacggcctcaaccctgggtttcttccctgggaggttgcctcttttttttgagatggagtcttgttctgtcacccaggctggagtgcagtgggaccatctcggctcactgcaagctctgcctcctgggttgatgccattctcctac[226 bp omitted]tctttagggtttgcttattagcttttctgcacacgatgcaaccatccacatttgcctagcgagggtctctatcccacacacccacagactccaagggtctctatcccacacacccacagactccaagggtctctatcccacacacccacagactccgagggtctctatcccacacacccacagactccgagggtctctatccccacacacccacagactccgagggtctctatccccacacacccacagactccgagggtctctatcccacacacccacagactccgagggtctctatccccacacacccacagactccgagggtctctatcccacacacccacagactccgagggtctctatccccacacacccacagactccgagggtctctatcccacacacccacagactccgagggtctctatcccacacacccacagactccgagggtctctatcccacacacccacagactccgagggtctctatcccacacacccacagactccgagggtctctatcccacacacccacagactccgagggcatatatcccacacacccacagactccgagggtctctatccccacacacccacagactccgagggtctctatcccacacacccacagactccgagggtctctatcccacacacccacagactctgagggcatatatcccacacacccacagactccgagggtctctatccccacacacccacagactccgagggtctctatcccacacacccacagactccgagggcctctatcccacacacccacagactccgagggcatatatcccacacacccacagactccgagggtctctatcccacacacccacagactccgagggtctctatcccacacacccacagactccgagggtctctatcccacacacccacagactccgagggtctctatcccacacacccacagactccgagggtctctatcgcacacacccacagactccgagggtctctatccccacacacccacagactccgagggtctctatcccacacacccacagactccgagggtctctatcccacacacccacagactccgagggtctctatcccacacacccacagactccgagggtctctatcccacacacccacagactccgagggtctctatccccacacacccacagactccgagggtctctatcgcacacacccacagacttcgagggtctctatcccacacacccacagactccgagggtctctatcccacacacccacagactccgagggtctctatcccacacacccacagactccgagggtctctatccccacacacccacagactccgagggtctctatcgcacacacccacagacttcgagggtctctatcccacacacccacagactccgagggtctctatccccacacacccacagactccgagggtctctatcccacacacccacagactccgagggtctctatcccacacacccacagactccgagggtctctatccccacacacccacagactccgagggtctctatccccacacacccacagactccgagggtctctatcccacacacccacagactccgagggtctctatcccacacacccacagactccgagggtctatatcccacacacccacagactccgagggtctctatccccacacacccacagactccgaggctgcattgcacgtagcttggggacccgagtgagctccttgatgaagctctgacagtatttccctcatgaggggtttagacagcatttcccttcaatcctacttgaagggaaatccctacagagggaaagtggtacctactttccctct[143 bp omitted]agcctcccgagtagctgggactacaggcacccgccaccacacccagctgatttttgtacttttagtagagacggggttt[272 bp omitted]cctgtctctactaaaaatacaaaaaattagccgggtgtggtggtgggcacctgtagtcccagctactcagagaggctgaggcaggagaatggcgtgaacccgggaggcggagcttgcagtgagccgagatcgcgccaccgcactccagcctgggcgacagagtgagaatccgtctcaaaaaaaaaaaaaaaaagactgagcgtggaacaaagggcttgactttgaagcgtgcagcggcgtgaaacttgcagtgcgggaaagtgaatttacagacgcaggacagaggcagttaatcgtacagtgacaggtttcgtaacctcagccgagcttgtgagcttgcggccgcattgagaaagaacaggagcttacaaaactggcagagtattttacggggagcgggaaacggaaggaggagtctggttcttatctttgcacggggggagtgcagtgctgggaggcgtctgggcggcattccttggggttctggctttttaaatggtgttttcaaggccttgcctgggggctttgcctgttgctggctttggggcgagtcagctttatacgaaaaaggtattttccgtttcttcaatttccgctttattccctccttgatgctttttataaataaggtttaatagaaagcatcactattttttatttacttctacagggggaagtagctcttttcctggcaggggtggacacgtagttatgggatgagctcggtggtactcggcctgtccacacgagcgtctctggctttgtcgatattcttgacaaggaggggaagagacaagagtacgaggcggactcccagtatggccagaactactcctagtaaggttttaaatcccccgagggatgaaaaccaaccacgggggggcggggggaacctggagaccattccggtttccaggtttgtgttggaacatgagctaagtctcgcattctcgcaattaattcatgacgtcctcctcattgtcatcgatttttaggcaacaattagttaaattaaactctccgcatatccctccttctgacatagatctagcgagagcagcaagaacaaagggaagagtagcatgtttgtacctaggatggacaagagatgtttgcccagaggagggggttgagcaaagcgacaggttaatagtaaaacaattaagatgacaaggaaaattactgggcttaagatttctaactacatttacttccttgacgaagcttcggccgtgcgtagactggtcagcttccggggtgactagagcagggctgtggtcactttcactggcatctgggtcctgtcgtaggatcagccggtttggatggtctgggtcttgctggctggtccacttgtcctgggctgctggtttcagccgactgtggagatcgaaggcacagttcctgaaacattaacagcagtgggagtggacaggatcgcagtctaggcccatcccatctgggtcccaaagtggttggattctatttctttttttttttttttgagacgaagtatcactcttgtcccccaggctagagtgcagtggcgcgatctccggtcactgcaacgtccgcctcccgagttcaagcgattctcctgcctcagcctcctgaatagctgggatgacaggggcacaccaccacgccccgctaattttgtatttttagtagagacagggtt[138 bp omitted]aaactaagcttttttgtttggagaataacgtgggacctctgggaggggaggctccgggaggagaggcacagccagggcttcctctttagaatgtggtgtccttattactgcccgttttgcctcctcgtctgcctttgtttcctttggcctccagtgttcctgccttttgtgcaccctgcaacgcagaacagctacgtctttggggcccacacggcatcctggagctgtaaaatttctttttttttttttttttttcatatggagtttctctcttgttgcccaggctggagtgcaatggcacgatctcggctcaccgcaacctccgcctcccaggttcaagcgattctcctgcctcagcctccctagtagctgggattataggcacctgccaccgcgcccggctaattctgtatttttagtagagatggggtttctccatgttggtcaggctggtctccaactcctgacctcaggtgatccgcctgccttagcctcccaaagtgctgggattacaggcctgagccaccacgcccggcctaggagctgtaaaatttcttctttgtattttatttctttgcccccagcagttaaaagttctctttcttggctgggcgtggtggctcatgcctgtaatcccatcactttgggaggtggaggcaggcggatcacttgaggtcaggagttcaagaccagcctggccaacaaggtgaaaccccgtctctactaaaagtacaaaaattagccaggcgtggtggcgcgtgcctgtagtcccagctactcaggaggctgaggcaggacaatcgcttgaacctggcaggtggaggttgcagtgagccgagatcgcaccactgcactccagcctgggcaaaagagtgagactccatctcaaaaaagaaaaaaaaagttcctctatgggatggtctttccaattttcttttttctttctttcttttttttttgagacggagtctcgctctgtcgcccaggctggagcgcagtggtgcgatctcggctcactgcaagctccgcctcctgggttgaggccattctcctgcctcaggctcccgagtagctgggactacaggcgcccccaccacgcccggctaatttttttgtattttagtagagatggggtttcaccg[241 bp omitted]tgaaaccctgtctccactaaaatacaaaaaattagccaggcgtggtggcgggcgcctgtaatcccagctacttgggaggctgaggcaggagaatc[135 bp omitted]ctcgggaagtattttgggtttgcagatctgattcccgaatccttgtaattatcccatctccgagatcgctcatgttttttaggtcacattgtcatcccacccaggatcttgggccaggaatttacgctccgctgaaaggacgttctgaccggggggtgttcacgctcccagactaacacagcggcctgtgaatcatggttctctctctcctgagacgagagtactgagggtagacattaattcagcccaagcgtacagctgtggccccagaaattggtcaatttgatccgcgaatccaaaagggtcatctaacagtggtttgagttcttttagatttctaacctctgaactggttaaagggggcatttacgaagtcaatatcccttcctcccggtggtccttccctaaaggggaaaagggctgaggcaggtctttttgagcaggaggcaaaaggaaagttctgtgggtttttgtttgtttgtttgttttttgagacggagtctcgctcttgttgccgaggctggagtgcggtggcgcgatctcggctcactgcaagctccacctcccgggttcaagacattccctgcctcagcctcccgagtagctgagtagctggaattacaggcgcccgccaccacgtccggctaattttcgtatttttagtagaggcgaggtttcatcatcgtggccaggctgccagtcctgaactcctggcctcgtgatccacccgcctctgcctcccaaagtgctggaattacaggcgtgagccaccgcgcccggccgaaagtttcgaatatccctttggcattgttctgtttcccgttggagctttcctgaggaaggggcatgttctagtggctgtccagcggggatgtgggtggcaaggtccaggtggttctataggggagggatggaggggcggaggagcgggtgggggaggggcggaggggcgaggggtgggtgggaggggcggaggggcgggttggggaggggcggaggggtggggtgggtgggtggggggggcggaggggtgggttgggaggggcggagggggtgggttgggaggggcggagggggtgggttgggaggggcggagggggtgggttgggaggggcggagggggtgggttgggaggggcggaggggtgagtgggggaaggtggtctagaggatcccacccttctttagatatggggcgtctctgctaaaaatacaaaaattagccgggcgtggtggtgcgcgcctgtaatcccagctactcaggaggctgaggcaggagaatcgcttgaacccgggaggcggaggttgcagagagtcgagatcgcgccgctgcactccagcctgggtgacacagcgagactccaacacacacacacacaaaagatatggcgcgtctcattcattcacaagttcctcttcaaaggtttggctcgttcagcgccctcgttcttcgtttcctacttccaaggccaacctgacttcctcaccctctgggcctccccgtctgagtctcagtaaacaagtttcccgccggtcctgatctgcagagatggcacctgccacccactctgcacatccccctcccgtcgccacgggctcttcccgccagtgtagccacattcctgcccctttccagttagcccttcgcgttcggcttagtctgcggtcctcttgcattgcgactccgagtttaacttccaacacacactttcaacctccaagagacgcccccacctgtgtcgccccaatagcgacttttctcaccgtggtcgccgcggaacttcaagggtccttcctacccgcgttgctgagagtctgggtttacgcgtcacctcgggcgggacccgatcctccgctcctgaggcccccacaatgaagcagtcggacgcgtctccccaagaaaggtaaccgccagcctctcctgaaacagaatgggatccaaatgggatatttgggggcggcgagtcggtcccgcaaagagaaaccagcacttagaaaatttctcagcgagaccactttacttgtacggaagggggctgcctgcgtgggatgcaatctccagagcacacgggacaaaggaagggagcttctgttcctctgtcctttccctgttggctggggttggacgcccacaatctaagctgatcccggttggctaaaacttaaaacttttttaaaatagggtaaacgcgccacctgcgaggaaagaagaagggggtaaggttgattgacaactttagacctggaagttgagtttctgaagaggaacttacttgtcccaaccaaatggtgcacaggacgtttatactaagaaattattcattttctgagatccagattcaagtgccctttaagtatttttatttgggcggaggaggtcacttcctcccacctaatttattaatacgttcatatatatatatatatatgtacatttttaaaggcagagatgtgcgtctcgccatgttgccgcgtctggtctcgagctcccgggctcaagcgatcttcccgcctcgacctcccaaggctctgggagtacagacgtgagccacagcggccggcccgtgtttaactcagataaaatctgggtaacacactttcaacgcttcaaccccctcgggcgcaccgctctgcgctcattgcaactttgaaagcaggaaggaagaaatgcgcaggctccagccgcgtccccgcaggccccactcccgtttcctagcaacgccgggtcacgtgcgccgccgcccggattccgtagcgtgagcctgccggagccggcgcgtacatgcgagcgtgtgcgcgcgtgcgcaggcggggcgaccggcgtccccggcgctcgccccgcccccgagatgacgccgtgcgtgcgcgcgcccggtccgcgcctccgccgctttttatagcggccgcgggcggcggcggcagcggttggaggttgtaggaccggcgaggaataggaatcatggcggctgcgctgttcgtgctgctgggattcgcgctgctgggcacccacggagcctccggggctggtgaggagcgggtagggggcgggggtgcggtcctgcaggggccgggaatggaggccgcggtgccgacccgaagccgacgggagcctggggcctcggcgcggggcggcctggggtgcgaaaggccggccccgggggcttcccgcgccagcatggagcttgggggtgaagtcccagggtttgaggggggactagaggttcctcccggcgcggcctgccgggctcccccgggcgctccggcctcgagcccggcctctgtgtgtgggcgtgaagctccctgcttggaggcgggagccagggggtcctggccaggccggtcttggtcaggggaggtgggcgtcttgcttttcggtcacctggggttgggggtgacctgcttcctgggtgagggcgtctgcgaaggcggttggaggtggcccgcccgccggtcccatcggccaggagaagggagacccaaagcctgggtgagcgtcccctttggcctggagccaggggtcaggggctggttggtgcctgcccaacccgtcctgctggggctggactccgcaggacctggggaaagcggcctgggcgtggaatctggagacgggtccaccctgcctgcgagtgttagggtcagagaccctcccctgagactctctggggcccccgcaagggcccgtgcggcctggagcgatcatcttggcgctcccttctggaaaaggggcttttgtcctccaagagcacatggaggctctgagtgggtcagccctccggatcgggaagggattaccgttcttcacgggatttagccctggcgtcttgcctagggcgtgcacctgcccccgggtgttctcccagactcttaagacctcgcaggctccctcgaggggccctgcgtggaagggaaggcggaatctccctctgattctgcctggattcagcacccagaatgaggtggtctctgaacgcccctcctcctttacaggcgaggaaacagccctgtgggaagtcgaggttccaaggtcacagtgagggggccctggccacccgattcagcgcaggaaatagtgagaaagtcgtttttagccgactctgacccgcattcggtttccagtgctgtcttaggagggccgtgtgttgagggtgggcaaacgtggtttggagagcgcatttgggaaatggattgaggtgtgtttttccgggagaaaagcatgacatcctttcttgcttcatagaaaatttcttcctttgttgagacccccatttggttctgggttaaagatttatagtgaggccgggcgtggtggctcacacctgtaatcccagcactttgggaggctgaggcgggtggatcacctgaggtcaggagttcaagaccagcctggccaacatggtgaaaccccatctctactaaaaatacaaaaattagctgggcgtgttggcgcacgcctgtaatcccagccactcaggaagctgaggcaagagaatcgcttgaacctgggaggtgaaggttgcagtgagctgatatcatgccactgcactccagcctgg[222 bp omitted]gaggcaggagaatggtgtgaaccagggaggcggagcttgcagtgagccgagatcgcgccattgcactccagcctgggcgacagagcgagaccccgtctcaaaaaaaaacaaaaaaaaaatttattgtgaccgatgtgttgggaacaaggtgcagagctggagggtctggcctcctgaagggtcaagagcaagggcttcgagcctctgtcctgggcattgagccgtagggggccttgggcagaggctggggagggggctccttcttccagaggctttgccagctaactcctgacctacgtctgagatttcgtcttcctggtaaccaaagtggccctttatcgaatgtctcctgggcaagggcctggccccagcactgcggccagctctctggggagacacagataggagcccatgggtgaggtgagcgcggaagataagccgcccccgccagccctgtggaaacccagccaggcctgactgggtttcaagcacagcacgaggttcccacattgagctaatttggacagccaagtgggtgaaagacctttggtctctccctgctgggtagggtggttcacagttttgttccttttgtgcatttgtgcaggagactgagaagggtttcttctgagcagaaagcttagcctggggcttactggccagagctgcctgcagcctgggaagcaggtggagtctgcagtgctggcagcgccgccgtgcagcggtgtagccgtgtgtgcgcgtgtgtgtgtgtggtgagaaaccccacttttgctggggactgactcgtgaagaccacaaggtctgggcaacacagccttggcccgtgtggggtggacactgctgtttgctctgtgaattcgtgactgtgtttgcctctcctgaaacttgcttcaggggcgtctgcgggttggtggggcacagccgggtggggtgagtgcccaaggttggccgtccgcgtctcctgtgggcttgtcggggaccggagggccggggtgtgctagctgggtcccgagggtggagggcttcacccccgagcctcagatgagaggagtgggagtgcctggctgcggccggtgggggtgggtgggggaggtgcccgaggctgcttcccagagctgttctcgctggctgctgtctgagcactggggtgggtggggaggagggcgggtgggggcgggcagccttatcctgcggggctgcttgtgtacaagtaccacgcggcctgcctggccctgagccctgggcaaggaggcggaggctgtttttagatgaaggtgactttacttgagaacatgggttacgtctcatgtggccagaatcgaattctaacctttctggggctgtggccgagggtcaggcgccgtccctcctcctgctgctcatgggtggaggctcctggtgcggcgggcgagatggggtggtccgtggggtgggggcgctctgcattgtccccgaggagcctctatggaggctttctcttccggacgcccccccacccccagtgacacgtcaatacacagacaccagcatcatcagcatccggagggacacagggttgttccatccaaagccttttggtccctttgggagcgatgctgcccgctgagaagctggcggacccagcgggagcaccgggaccggtgcagatggcgcctgggagcccgggactcctggaaaggtggctgggggcagctcggctgcgggccccacctggtcctcctcactttcctgtgtgccctgccctgcctggaggtggggtgaggtgagtcaggggccagccctctcctagcacccctgggtgaggaggatgtggagcccagccctgcaggtctggaggatgaggagaggggctgctgcagggcaggaaggagcttgccagctgggcagcctctggctgtgcttcctgccctgactcacctcgcccagctctgcacatagctgccagtgttgcagtctgggaaatcttaactcccaagaaatg[222 bp omitted]ctgaggcaggagaattgcttgaacccgggaggcagaggttgcggtgagctgagattacaccactgctgaacagagtgagactctgtctcaaaaaaaaaaaaaagaagaagaggagaaagaaaatggcgctgccaaaacttgtcaactgcgcctgcccagagctcacctgaggtgctcagacgtgaacattcctgtccccgtggccttgggggccgtgacctgtgcactgccacgcagcctcggagccgtgtgcacgcatatgcacgtgtgtatgtgttgtgtgtgtttgcagacgtgtgtccttgtgtgtgtgtgtgtgttgtagcggtgcctggggagtctgacctcagaaggtgctgtggggagggctgcaaggtcctggcgggaggaggcactccccacgcttccccttgggctgggctgttcctggcaggcgagtgctaggcacagtgtgaggttctgtgtggattctgctgtgctccttggcagctctgggggccttcccttgcatttcgaaggaaggggaggcgtgtggctggaggtgagaggccctgaggccctgcctggctcccagcttcccaaatccgcctctctctgggtcgccgccctcagagattgctgaggacacgagctttccacccacgggctgtcctaacggagccgggctaggggcttctggacagaggccgcctgcccctttgggctttggggtttgtttttctcagcagctcacccgggtctctggggtcagggtatcgggcagaagtcagaggacggtgcgcttgggacctgagctctgggcagccctcggggctcaggactcctggctcttctgcccagtttcatgtgttttgtgttttgaaaccacgtgtggtcccacagttgtgccctcagaagccgccgtggctgccgtgaggtagcagtggacgggacgcccacggtctttcccatgccatgctgtttccagccgggccccatcactctcccacaagctgaaaggaagtggcttctccaccagccctggctgggagtcctgtgggcgaggccttccccaggagctgccctcccaagtgccccaggcactaacaagaccccacgcgtgctctccccacagccggcttcgtccaggcgccgctgtcccagcagaggtgggtggggggcagtgtggagctgcactgcgaggccgtgggcagcccggtgcccgagatccagtggtggtttgaagggcagggtcccaacgacacctgctcccagctctgggacggcgcccggctggaccgcgtccacatccacgccacctaccaccagcacgcggccagcaccatctccatcgacacgctcgtggaggaggacacgggcacttacgagtgccgggccagcaacgacccggatcgcaaccacctgacccgggcgcccagggtcaagtgggtccgcgcccaggcagtcgtgctagtcctggaacgtgagtggcgggcacctccctccccgcctccctcagtttccctcctgtgccgctcgcctcccggctcctgctcagtagaacccagacgcctcctcccctctccgtcccgctgtgccccgttgggcccaccgcctggacggaggggcccggacctgaagggggtgggctcgccgcctgaccaccagcgctgggcggcctggctcggggcaggcagggctctgccctccagcaggtgggtcctcgtcctcccctcgaccctcgtgccatccgttccgtcgtttctgcttccccgggcgcctgcccggctccctccctgagcgtccatactgcaagcctgaggggccctccaagctcagcccaggcttgcaggtctcagaaccttctgtgtccttcgcagcatctcgttctaagggattttcaaatttcaattcctagcgggaatattgtaaactaaccaagaaccaagagatttgcttggttggggattggcagaagaaccggggtgctcccagcactgctggagtgccgtcagcctggggctggggggatgtggggccacctgagtgcctcctagagaagggcacgggagccttggccgggggtgctgtggctattttttttttttttcctggagatggagtcttgctgttcccaggtggagtgtggtggcacaatctcggctcactgcaacttccgcctcccgggttcaagcgattcttctgcctcagcctcctgagtagctgggattacaggcatgagccaacatgcccagctaattttttgtatttttagaagagacggggtttcacc[135 bp omitted]tttccagtttgtgctggggctgctacaagagctcgatgccctggtccctgctcagggacgtgggtgggtgccttgtctgtccccacaccctggtcccagcctcgtgtgtctctgggcaggaacatcgccaggcggggcctctgggttcccagcgccttagcccagggcccgccagctgccagcgaagggtgccttcccgaagggggtgccttcccgaaggggcctcctcagcaggcgctgggctcttcccttcccggaggcgtggccagaagttccccttgggcctccggtcctcggggcgtaagggccacggtgtatttttgggatgaaaaccagtccttcccggggaggagccgcaggttcctgggggtcaggcaggcagcgcgggccgtgctcctccactctgctgaccgcgtctcgccgggccttgcagccggcacagtcttcactaccgtagaagaccttggctccaagatactcctcacctgctccttgaatgacagcgccacagaggtcacagggcaccgctggctgaaggggggcgtggtgctgaaggaggacgcgctgcccggccagaaaacggagttcaagtgagtgcctgaccacgccatgccgccacctgccccttctcacggctctcttgccgccagcggcctgtggtccgtgagaacaaaagaccggtcggcaggcttgatccaggcggaagttagggaccagctccgcgcagacccccagagggaaaccccagggaggggtctgaggggcgtccttgtgaggcagggggctccagcagccctggcaggagtccccattgcttgctcctcactaggtcccgggcacgaaagggcgccacactgccaggtcccgggcacgtgtgcgggcctcccaggctctgtgctcctggcacaagagggcaccacactgaggcatgccctgctcggaccccagacgctgtcatggccggagctttgtcataactggggctgggacggccctgggagcacagagccttttgttttcaggctgactgggaagacggtcacagggtgtggggtgcagagcagggaccagaggtgtggggttcatcagtcggggagaagggggtctgttggttctctcacctgtggggtcttgccagcctggctctgtccttggggccgcacggggaccccaggagttcttttgaggttcagacttgactgggacagttttgctttttcactgtgccgtggttgggcccctggagaaccctgggtccttggaggcgtcctgcagagctggtacgcggctcacctgcctgctgtggttgcagggtggactccgacgaccagtggggagagtactcctgcgtcttcctccccgagcccatgggcacggccaacatccagctccacggtgagtcctgcagccaggggtaccgggcaccaccgactgtcgggagaagttgttggcctgaggcacccggcacatcccagagccctggccccctgctccctggaggggaacagccctcctgcgggaggccggggatgggggcgggcctgcggttccaggctcctctctctcaccctcctgtcagggcctcccagagtgaaggctgtgaagtcgtcagaacacatcaacgagggggagacggccatgctggtctgcaagtcagagtccgtgccacctgtcactgactgggcctggtacaagatcactgactctgaggacaaggtgagaagccaaggaggctgggggtcctggacccagccctcaggactgggtgagaggcctagactgggggtcccggacccagccctcaggactgggtgaggggcctagactgggggtcccggacccagccctcaggactgggtgaggggcctagactgggggtcccggacccagccctccggactgggtgaggggcctagactgggggtcccggacccagccctccggactgggtgaggggcctagactgggggtcccggacccagccctctggactgcagccctccagactgggtgaggggcctagactgggggtcccggacccagccctcaggactgggtgaggggcctagactgggggtcccggacccagccctccggactgggtgaggggcctagactgggggtcccggactcagccctccggactgggtgaggggcctagactgggggtcccggactcagccctcaggactgggtgaggggcctagactgggggtcctggactcagcccttgcctttggtcccctaggccctcatgaacggctccgagagcaggttcttcgtgagttcctcgcagggccggtcagagctacacattgagaacctgaacatggaggccgaccccggccagtaccggtgcaacggcaccagctccaagggctccgaccaggccatcatcacgctccgcgtgcgcagccacctggccgccctctggcccttcctgggcatcgtggctgaggtgctggtgctggtcaccatcatcttcatctacgagaagcgccggaagcccgaggacgtcctggatggtgagccgtctgccctcctgcccacatgccctgctctcggggtggcccagggccactcctggtccgtccctgccagccccaccgctgacccagagcttggaactgaggagccccaggcagggagttgatgggaccccgaaagaaagtgtgggatggagggtctagccccgggcagctgcggctcagtgggcagcgggaccccgggaggaggaggcggcacctccgccccacagcctcacccggcccttccctcccgctcacttggctgcaagccagtgtcctccgtggtgagccggcccttgctgctctgcatgatcaggctcgggaacctgaggtcagccatgctgtgctccggcagcccctgcctgcctcctcgcggagcccttctgccccttgggctgcgtgtgccggggcgaggcctgtgtggggcctgtgatggcagctcctggaaaacgctgtggggcaggggtgaggcccacgaggccatggggacagctcaccatggggagcacacctgcaggtggggagggctgcctttccccacagcactcagaagatgcacgtggccggggctgatgagctgccccgagccacccctgggggtcactgagggcagggctggcagcacagatgcccctgctcggggcctgagtggggccagtgctgacaggctgtcctctcgtcctctttttcatggcggcggtccttcttcagatgacgacgccggctctgcacccctgtaagttccagctgtgggggtcgggggtcccaaggagcggcctgctgccccaggcctttaaaacacaaaggcagagcccctgggcttcagtattcgggggtcctgggggccggggtgggcaggggtgacttggagagagtgacttgcgggggacaccctctcacccggcccctcgtgccccaggaagagcagcgggcagcaccagaatgacaaaggcaagaacgtccgccagaggaactcttcctgaggcaggtgcggtgggcgggagctcctcctgagccaggtgtggtgggtgggtgggcgggaactcctgagccaggtgtggtgggcgggatctgctagccaggtgtgggctcctgggtcccgcctgtgggtcgctgggaggtgggtccagtctgagcgcccctccctgtccacaggtggcccgaggacgctccctgctccacgtctgcgccgccgccggagtccactcccagtgcttgcaagattccaagttctcacctcttaaagaaaacccaccccgtagattcccatcatacacttccttcttttttaaaaaagttgggttttctccattcaggattctgttccttaggtttttttccttctgaagtgtttcacgagagcccgggagctgctgccctgcggccccgtctgtggctttcagcctctgggtctgagtcatggccgggtgggcggcacagccttctccactggccggagtcagtgccaggtccttgccctttgtggaaagtcacaggtcacacgaggggccccgtgtcctgcctgtctgaagccaatgctgtctggttgcgccatttttgtgcttttatgtttaattttatgagggccacgggtctgtgttcgactcagcctcagggacgactctgacctcttggccacagaggactcacttgcccacaccgagggcgaccccgtcacagcctcaagtcactcccaagccccctccttgtctgtgcatccgggggcagctctggagggggtttgctggggaactggcgccatcgccgggactccagaaccgcagaagcctccccagctcacccctggaggacggccggctctctatagcaccagggctcacgtgggaacccccctcccacccaccgccacaataaagatcgcccccacctccaccctcaccctctcctggctcctgtctgtgcctgacggggttgggttttccgagagcaggtgcaccctgggctctggtggtcacagcaggggtgcgtccagtactgggatttcacatgcgaggacgggtctgctgagaccgcagtgggtgttgggtggctcggggcatgggctggacagggcctgaggctgtcagccggactgggaacttggaaggtggctggggccgaccccgtgcctcagagccacacagaagagagtgggcactgacctgagccttctctgagcctgttactcctctcggcatgttttgggcctgacaaaggctgaggctttctgctgcctgccctgcagctgcctgcacccacccacctgggcgggctgcttgggcaaggttcaggggtggtcctggctgctcctggagagtgggtgtgtgaagctggtgcccagaggctgagggatgcccagcccctgcccgcccagcacacggaacagatgtggttgcagggctggagagcttgggggaccaggagcttagagcgtggaggttgcaagttgcaggaccagtaactgggtctggagggaggtttgcagcggctgtgtcagccctgcaggccgagtgtggcactgggccttctgctggtctgagcgggggtctcagggtggaggtcagcaaaagaggcttagtgggggcttagggagcctgggtgggttcccagagaagctaggaatcagatgggaagatgggaaggcagtgtgtttccgtgttgggcaaatccagcgttttcatgccacggaagccaagaaagggctcacggcctccggcctcacagggctacgcaaagggggagttgaataaacacggtgacgggccccgggcggcagctgctcccggcactgatcctgctgggccagcggtggacttgcagggcccacatccggagctgcccactggtcctcgtgctgcacagccttggaggatctgaggctggctcagggtccctggcagcaactgccctgctaggtgggggctgctgggttccacagctgggccctccctgccggctgccaccaggcggcgctgcacgcccacgctgagtggggcaggccctggagcccctctgcccgggcagcctgacggcccctcctcctcggctgagaccgcagagtcccaggcatcacccactgaaagtgtgctcagtgacctgtgaatagggatgccacgtctgcgtgcagacattgattaggcgcctgtggtatacctggagctggagggtgtgcgtggacaacaggcagaaaggtccagtgggatggaggctgccaacaggacgatggggaaggggcgcgttggggacatcgccgggcacgcggcccaggtgggcccctggctcaggtctccccccacctccctgcctgggctctgtccatctttctgccgcaccctcagccccaggtgtgggcccaccgtgcttgtggacgcctcatgctctgtaccgggtgggaggtgtgggagttacaggtcagggcagccttgggagacgggcaggtttcctggggtgcttaccggcagatggggcgcctgggtccgtgcagggtcgtccgcccgagaaagcagcccctcacccctgggcactaacttcatcttttttctttgcacacagaaacgtaaacctgattcacaaaagtataaccactcagcatgtagctttgtacacctgccctcagcatttagtgtcctcgttcatccaacaagcatctaataagcactggggtacgcagtggtgggtgtccgccccgtcactgggtgtccagcgtggggtgcggaggtggatgtccaccccgtcggtgggtgcccggcgcggaggggtgcggaggtggatgtccgccccgtcggtgggtgcccggcgcggaggggtgcggaggtggatgtccgccccgtcggtgggtgcccggcgcggaggggtgcggaggtggatgtccgccccgtcggtgggtgcccagcccgatgtccaccccgtccctgggtgctcttggtggcaactcgctgaagcctgcctcggtttccccagaggtgagatggggaagtcaccaccgccaggtcatgagatgagattagatcatccttgccaagtatcaggaaaaggcctcagggctcccctgggaaccttggggtctcaggagtcccagctcccagtgggcaggggtagggttggggcggccagaggaacaagtgtttgttcatgggctggaccccaccgcggccccaaagctgggctgcctattcctgtcctgggcaaattggcctctcctccctcttaccccccaccccagtgggagcccacaaggacagggcctgccccatcccctccactctgggctgtggctctaagcagcacgtcccactctaggggctcagggcagggacagtgactcatccaaggtcccgccgtggagggcagagctgaaggagtgagaaggagctgctgacatggaactggcccgtgcggaaagactttggtcttccccatatttttcaccaggctcctggggcaaggtgagcccagcagggagaaggaaacttgtgtgaatcccaggccagcaggactgggggccctgctctcatcgcagacgctgcagacacggaggcctggggcaggggccctcagggctgtgctcctgcagagatggagcttgcgtgtgtggctgagactgggatgccaccccctttcctaagcctctgtttcctccgctgtaaatgtgggcccaggcctgccatgcacagctcatctctttaattttcttttttttttttgagacaagggtctcattctgtcacccaggctgtttgtgcagtggtgttgatctcggctcgctgcagcctcgacctcctgggctcaagtgatcctcccacctcagcctcccaagaacctgggaccacagatgacacgcacccctccccctggctcgtttagtatttattgagtcaaactgcagattttccaggcgggctcagtgcctgccctggcctgattttgtcttcctggtcttaaactgcttttcactccaaaggccccaaaattgtataagctttcagggcgtgcgacctggacctgtcctgactaagtgggaaatgtaggtccgaggttggtaaatccggtaaacaatgccgagagaggctgcagggggcggggagatggggaagaccctggggagggaatggcagggcctggggaggttcagcgaggaggggtctgggagttcggggtccagtgacccaggcacacaaaggccagactcgggcggaggagtacaagctgctggagggacccgggctttcttccaaaggcactgggagctgtgagtggttttaggccacagaccgatgtgactgactgaggggccaggccctggggctccatgctccctacacaagccaggtgcggtcccacctcaggaccctcgcacaggctatgccgcctgcccagagcttcctgcagcttcccgggccgcaccccctccttcaggccttctcccagcacctggccccctccccaccctgagtgtttggacaatgctcaccaccttctgctggacagtatcttacttgctactcataaggttgactgtgatacccagctttctcccctggctggctctctgagtcagctgtactggc[136 bp omitted]ccaggttcaagcgattctcctgcctcatcctcctgagtagctgagattacaggcatgtgccaccacatccggctaatttttatattttttattagaaacagggtttt[145 bp omitted]caagcgctggagtgcaatggtgtgatctcagctcactgcaccatctggctcctgagttcaagcgactctcctgcctcagcctcccaagtagctgggattacaggcgcccaccaccacgcctggctaatttttgtatttttagtagagatggggtttcaccatgttggccaggctggtctcaatctttaaatattttttaaattaaaataaatgagcatggctgggggggtggctcacacttgtaattccagcactttgggaggccgaggcgggtgggtcacctgaggtcagcagttggagaccagcctggcccaacatggcgaaaccctgtctctactaaaaatacaataattagccgagcgtggtggcaggcgcctgtaatcccagctactccggaggctgaggcaggagaatcgcttaaacccgggagtcggaggttgcagtgagccgaggtcacgtcactgcactccagcctgggcggcgacagagcgagactccaactcaaaaataaataaatacataaataaacagataaatacagagtactccggcctgggcaaggggtcagagtgagtgtgccgaggccagggagggtccccgtgcacactgacaggcgctggcctgggtaagcctgtgggctgcagagccgtcgccaggatctggtgacaaggaccccgagccacagcctcccttgtgacttgcgggttctgccggcgcctgcaggaggcgtctttctgcttctcccactgccaggcatgggcggttctcgtgccgtgcgggtcccgcctcctccctgctcccagccgcgagccctggggctctggcgacctgcccggcctgacatcttcccagggtgaacataaaagaacccccttcagctggagcacgcatctgcctcggggcgggccacagcctggcactgccaactgtgccgcccgcccggcctctcccgcaccaccttgggacaaacagctgtcctgcccgcctatgcggaggtggccggcggggccggcgtgggggcgcagggatccccagggtgtggggcagccaggccgaggcgagagacacggtcgggctcagcccatccactgtcagccgggcacatgctggccctccctcaagtaccactgagtgcctcctgggtgtaggaagagggccatctctgccccggtggcctcgaggtgcagatgggtggggggcacccggcacacgggacatcgtggctgagaggacgtcaggccaggtgccaggagggtcccaggagggcctcctgcctccaggtggggatgttcagcctccacttcttcgagtgtgactgtctgtctcctctctctcacttgccagcttcctcacctgccccctcccggctgtctggtgggctgggtggctagggacagaggcctcatgtcacctggcaccaagcagcacccacgcccagccggcttcggcccagaagcagagccttgggaagcacctgtctcagagctggggactggaggcactgggggcacagctgcacccggagtccgaggggtcggggaaaggaggcaaccccggggcagggggctctggtacccgtgcgaaggcgctagtgggctttgggtctccctgtgaccccaatctaaagcccaccagacctagaggagacccccgccgcacggctccccagggcactgtttgaggggtgggtgggaaccccacaccctcgggtggcttttccagttttccttgtctggctgggcttggcctcagtttcctcaaatgcagaccagggagaggagtgcctgagtctcccagaacggcgcccaagccggcctgcccctccccacgcactcaagggtctctgtccagggcccacaggcgacccagcaagggctcctgtgacctttagaaacaccctttcgtcgtggaagtcttcaaacctcacagaaagcaaggaggcgctggccgtggcggcctctcccgtctcccaggcccgcgtccaccctccccgcgccggtgccctccggacagaggtggaagccgcggcgcaggagaggcggctccggccgggcagcggggcccggtgaccttgggcgcgtccttacacgtcgcgggcctcagtttcccctcctggggagaggcccgcgcggggctccgaggcctcgggccgcgtgaccttggggcgcccccgaccccgcggcccgagtttcccggcgccgagcggaggcggcgcgcggggagggggcgcagccgaggcgggtctcccgcccccgcccctcccccgcccctcccccgccgcgaggctccgccccccgcggctccgccccgccccgcccccgcctcccccctccctcgggctccggccggcggcggcggcggcggctccgctccgcactgcccggcgccgcctcgccatggacgcgcgcgggggcggcgggcggcccggggagagcccgggcgcgacccccgcgccggggccgccgccgccgccgccgcccgcgcccccccaacagcagccgccgccgccgccgccgcccgcgccccccccgggccccgggcccgcgcccccccagcacccgccccgggccgaggcgttgcccccggaggcggcggatgagggcggcccgcggggccggctccgcagccgcgacagctcgtgcggccgccccggcaccccgggcgcggcgagcacggccaagggcagcccgaacggcgagtgcgggcgcggcgagccgcagtgcagccccgcggggcccgagggcccggcgcgggggcccaaggtgtcgttctcgtgccgcggggcggcctcggggcccgcgccggggccggggccggcggaggaggcgggcagcgaggaggcgggcccggcgggggagccgcgcggcagccaggccagcttcatgcagcgccagttcggcgcgctcctgcagccgggcgtcaacaagttctcgctgcggatgttcggcagccagaaggccgtggagcgcgagcaggagcgcgtcaagtcggcgggggcctggatcatccacccgtacagcgacttcaggtaccgcctccgggagggccggtcggcgcgagggggcccggggagccgggcgcgcggggagccgtccttggagcgcctggggagggcggggcggcgcgccgggccggtgacctcggggctcctcggtgacctcgggcgtgtccgggacccgccccggagtgaccccggcgcgcgaggctccgcctctgggggggctccccgggtgaccgcggagcgcccccctcccacgcaccccgacatcctccgccctgcggcgcggcgggtggggtgggccgcagggccagggtctgagcgcagaggggcagagaggacgaatagaggggaacgtgggccccagagaggcggcggagcgggagggaggaggaacgaagggcgcccgggaaggacgcgccccagggaggccgggggagagggggttaagcggctcccacggcgtccacccgcgccccgcctgcgaggaggcgcgcccggggccgcgggcctggaaagcgtgcgggtccccaggctgtgtccccgggagccgctccacccgagccgcgggcggtgcgcgcatgcggcggtgggtgtgtagacgccgctgtggatccagccggctaatgcgtggaaggctcggagcagggccggcgcggggccaccgccactgatgtttgcggtcgtggttcctgggctgtgcgtgctgtggccggagagcgagaccggcgcgtgtccccgtgggctgtgtgtgaacaggggcccgtgaccgcggcggggttcccggggcgcgagcctgtggccggagaggtgtgtctccaggagtgtgtttgcgtggtggtcgcgggcgtgtgcgcctccggtgggtttattttggtgggacgtgtggtttgtgtgtgttgggaccaggtggcgggcgtgcgcgtgtacgcccggggccggtgtgcaccggtgggcagtagtgtgagccgcaggcaggtctcacacacgcgaccatggagggatgcgtgtgtgtttgtgtatccacgagtggggtgtgaggtggggtgtggagggtgcaggtggagggtgtaggtggggcccgccgggctagcgaggccgggcgcgcgggacgggcgcggtttcagcaccacggacagcgcgccggacctgggaagcctgcggttttcccgcctgtctctcctcctccaggcctgggcgccccaggacagcccccacggaccctggacccccggaactgggcagggaggctgtggggttctctcttcccctggattctctgcacccctagtgcttgactggagaaactgaggcctggggcacatgcgtcctggacagagcctggaggaaggccctggaatcctcctcccaccccaggccttcctgagaggtgaatacagctttgaccagaagcctggatttcgagacaggccaggggtgggaggagccccgaaatccccagaggggctgtgtccggcccctcccaccctgcctctgtgccccaccgggagagcttggtcagcatctgggctctggcctgcgaaatgtggacagtgagcgggaaggactggacttccagggctgctggtcggcctggccccacttccagtcgggcagtggcaccccctgaccggagagggacgcggtggagagggagctgtagaacgtgcccactcccctccgtcccctccagcatgaccttcgacagagatgggtgcaccgcagcgtgggggctggcaggtggaggcccacaccagccactccctcccctgggcagctccagcgaccccctggctgcagaggggcggtcggtggcctggggggcaggtgggcagatggctgatcccggggcttggggggaaggccggtggtaggagtgaagccctctcatccttccaccctccttgggcgtggtcgcctggaggcctgggcaggctgtggccccgctctgtgctctgaggcatagagggctcagaggcccctgtgtggaccaagtgcagccccaccccggcagatgagtgttgaagtggaactgagcaggcagggaatggggttagcggggcctgtcttcgggactaggggagtcacggcagtcagattttaaaaaaggatttcgatgttgccaagctgggtgcacggggcccctaggaccctccccaggcttgggacctgtgccagtgtggaatcagtgtggaaaaagacccccaagaatatctcaaaagctccctaagcaggcggccggaccctgctgtggagggtgttttggggcagcccacagcaagcgaaggggcctctacgtttgcagctgactcaggagcctggccccaactggcttcgggcccaaggcctcctgtgcctggctgggtgtcttgggtcctcgctgggcccctctgcctcagtttccccaattgcacggtggggatggtatgagggagaaggatggggtctttcacagccttgccagtgtctcagcctcacgtctcacactctcttcacctccccttcctgctgagagagtgctgtgctccttgcccagcctgtgccccccaggcacgccctcaccccggttcttcctcgctgcccagctgtctccgccacgcccaagtccaccctgctcccgtgctcggaagtggcctctttcacgccccacgtcccagtcccagtatacagcaggtgccacatatttgctgaattttctgaggggcagagcatgggtcctgggctgacgtgggtccagatttcggctctcaggcctgggcggctggcccctttggaagtgcagttggtgccagggtgcagcggctcacgcctgagatcccagcactttgggaggctgaggcgggcggatcacctgaggtcaggagttcgagagcagcctggccaacatggtgagatgatcccgtctctactaaaaatgcaaaaattagctgggcatcgtgacgagcgcctgtaatcccagctactcgggaggctgaggcaggagaatcacttgaatccaggaggcagaggttgcagtgagccgagatcgcgctgctgcactccagcctggctgacagagtgggacttggtctcaaaaaaaaagaaaaggaagaagaagtgcagttggtctattgctgaagtctctggggctgtgggtggctctacaccccggcctgacgtctgaaagtccccagaggcatgctgggcgcttccctggggtgctggtggaagagcaagttcaaggacccaagttcaaggttttgggttccagaggctcaagttcccttccttgtaggtgatcacggttggtgcctgaattggaacaggcgtgaaaaccaagaaggaaggggtttggccttatgcaacccccagggcttcggcagggtcttctgtgcctcccagagcaaaattaggtcaaaaataagtatagttcattcctactcccttcaccccagccgccgctgattctaaaggccacacaggtccacttgggaaagcctgagtcgtgcaaaggagggtgtctccgcaggagaggggcaggggctggaggtctctgcacgagaagggctggggctggagggtgtctccgcaggagaggggctggggctggaggggacacgaaggcccagggaggggcggtctgaggaggtcgcgttctccgaagcttgctgtcatccaccctccctgcccccggtgtcaccgagggggctgggcagacctggcggggtggagacctgggcagatccggggtttgtgccctgggagctctggggggcacagggcaggtgtcgggtggagagaggctggcggcttcctgactgccctcggtccagttccagggctaagtgccctgtggccgccctgccgtctcctgctgctgctgacttgcaggtctgtgtttctgaattgtcttcagctggggaggccccgtgtgaggggagacagacgagatgctccccaaagccaggatctgttatgtcccctggggtccccgagaggactggtcggggaggagctgctccaagaccccaccaggacaggcggcccctgggccccgcctcagatggctgagtgggtcagcgggagatcagcctgggggtgcagctctgcaaatccgcagtgatgaatcccagcattagggcgtgggaataaaccccccattatcctggggggatggccccgggggcagggcgaggcgagggtttgtctggctctggtcacggcaggaaggcccagcgtgtgcaggatggtggggtgtgcatggacccatatcccaggtggcggtggcctgccctctggtctgcgtggaggggtcaggggtcggggtggccaaggcctccccgctctcttcagggccttccctatgttccctgctcgaaaacggacatctttgtccaggcactgtggctcatgcctgtaatgccagtactttgggaggcggaggcgggaggatcgcttgagcccaggagttcgagaccagcctgggcaacatagcaagacccccatctctacaaaaagttaaaaaattagccaggcgtggtggcgtgcacctgtagtcccagctactctggaggctgaggcgggaggatcacctgagcccaggaggttgaggctgcagtgagctatgatcgtgccactgcactccggcccgggaaacagagtgagaccctgtctcaaaaaaataaaaaaaacctaaaaacccacatattcaagtcaccttcatcagccccccactcacttgggccgggccctgcctcaccccccaccccacggttcagcctcgcaccctgtgcgctggccgcctctctcctgccagatgcctccccgtccccctttctggcctcccggctgtcagcatgggcctctccagacatcggtccttctttccctgtcacctctacctcctccctggctccagccctccccagtcatgtcccctggtcccgaggccgcccaccggccttgaagggaacccggagcatcaacctccgcacctgctgcccctcttcagccactgccctcccctcaccatctcatccacccacacgccacctcctccaaggagccctcccacctgcctggggctgacaggcccatcccatgtgtctgtcttggggctgggcctgtgtggtcatcgtgtgccccggcgcccggcgagagttcggtgaacatctgccccgtcgggatcacccgggaacccgagatctcccccacccgtagcagctccctttcttaatcctgggcacctgccacggatctggccatgactccacagctgagagtgccgtctcctaatcccccggcccgaggctctcccttaatcaccgacctccggcccctaatcctctcccggattgtccccatctgtaaatcctggacggcctccggcctgaggctgggctcctgcggggagggcctggctgccctcgcccgttccccaacccgggactcaggctccagcaggggctgaagaccccctgggcaggccctcccctgggatccaaggggctgagggtcctgggccttctgttgccaggagacctggtgtcctcgtggggtttgggagccgggtcggcggcctcctcccccaagcttcatccagccctggagagacggggacctgcgtcggctttgggaacttcaggggaagaaccctgagctcggggcaggagaatgacatggtctgtctgggttcccatcccactgtttcacttatggctggaggagcctcagtttccgtgtcagagccgagagagaggctgggcggctgttggaggagggctgagctcacatcggtgtcaggtgccgggggccccactgaagccactctggagtgagagggggtccgaggcttcttccggtcccccaggtgtgagagctgaggccggaaggtttccccagggacccagcctcatcccggcctccggagctggtctccctccctgcctgcgagggccaagctggacaaagtggcaggacccccgcgtttccgaggaaggggccctcgtagaggcctcactgttacctgtcggggatgggttttaaatacaggatttaatgatggtcactgatgtttctgtgacagctgaggggggcctgtccctgctcagcactggggttggacaaggagggcacagggtgcccggggagtgctggggcccgcctgggtccctatggtggccggatggggaaagggctgccggacgcggctgcacagagtgtgagggggagtggggttgggctttgggccttcccctgaccccaggtcccctctctggggtcctgtcttctggagctgcctccccctccccagggcgagaggcaggagagggtctcccaaggtcactcagtctagtgttgggcaaggagagggttggggtggagagggttggggtgcaccggcagagacagtgacgccctgcagggctctggggtcccctctgccccaggcctcggtttccccttggtaggggacatgcgtgggcgcccttcttccttctgacctctggctggtgacgacgagggttgcggccccaagccctgcttggaggcattgtggttggaacgggcaggcccagccccacaagggaccctcagggtggccaccccacctgtcccttctcctaggcccctctgctctgacccccgtaatccccaggaatactgccctgctgggcaagatgggctgaggagtcctttctggggacacaggagcagaaggctcaagggaggtggtttccagacagtgtgggccgtggataagaggacagtcctggggtctcatcctgcagtcccacttccatcagaggggaggtgtggtacctgcccccagctcaccccaagaataaagggggagaatgtctgttaatcatcacctggaaaggaggccttcatgttatatggccgtttaaaaccaggtaccccttggcggtttctaggtcctcctggtggtttctaggtctccttggcggtttctaggtcccccttgacagtttctaggtctccttggtggtttctaggtcttcctggtggtttgtagatctccttggcggtttctaggtcctcctggtggtttctaggtcccccttggtggtttctaggtcctcctcgtggtttctaggtctccttggcggtttctaggtcccccttgacagtttctaggtctccttggtggtttctaggtcttcctggtggtttctaggtcctcctggtggtttctaggtcctcctggtggtttctaggtcccccttggtggtttctaggccctcctggtggtttctaggtctccttggcagtttctaggtcctcctggtggtttctaggtctccttggcggtttctaggtctccttggcagtttctaggtcccccttggtggtctctggagccccctgggagtttctcctcgcccctcgtgggggaggtttctaggccctgtggccttctcaactgctctttcctgctggttttgtcccaagactggtgctcgaaggtgggaggcaggtctcaatccagagggtgaggctggggctgagctccacggtgagccccctcggggctgaggggcagggggccagcggcaggcgggtggcatcccctcagcccactcggtgctggggccctgggggtctcgttgctgagcagatgtgtcggactgggggcctgagccctcatgtcctgtctagactcagggaaaggaaggccttaaatttctagtccttttagtcatttgatttcacccttcaagcttgtgaggggacccctccccaccccgagatcaagtcagccttttttttttttgagacagagtctcactctgtcacccaggctggagtgcaatggtgcagttttggctcactgcagcctcgacttcatgggctcgagcaatcctcctacctcagcctcccaagtagctgggtccacaggtgcgcaccaccacgctggctaatttttgtattttttgtagagacgggatctcactatcttgcccaggctggtcctgaactcctgagcttctgtgatcctttagtcttggcctcccaaggtgctgg[284 bp omitted]agcctccttaagccctggaattacaggcgtgagccaccgtgcccagcctgagtcagcccttctctaggttttatccccagcctgggtggttcttggggggtgtcccgaaggctcagcccctccccatcccgaggcggtggatgcttggaagaagagactgaggttctcaggggctgcaggaacttgtccaaggtcactgtgccagcaggcgggtgccagcccaggtctggctgatgccaccacgatgtgagtcgctgggtcccttccagcgtttggctcttgcagaccgagctgctgtgaacattttggtacaaatggctttttaatttttttctcttccttttggaccgtttcctcgggatcatttccccgaagtggagcgtctgggtcaccccgcagacgtggtgttaacagcttttccctcgaggagccgtccagaagcaaggagccgactttcggcggctcctgaaacaaaggtcccggcggccacgccagcgatgagctcccaggtttttctttattggtgttaactttggggagtccctccagtccctcagcatctcctccgaaaggatgtggggaccccggccatgata[226 bp omitted]ggagggtgaggcaagagaatggtgtgaaccctggaggcggagcttgcagtgagccgagattgtgccatcgcactccagcctgggcgacagagtgagactctgtctcaaaaaagaaaacctcaagaactaagaaggctgagttggtacagggatgggaaggggtcccgtgtgtgtgtgtgtgtgtgtgtgtgtgtgtgtgtgtgtgtgtgtgtgtgtcagagggtctcatgttacccaggctggtcttgaactcctgggctcaagcgatcctcctacctcagcctcccaaaatgttggaattataggcatgagccagtgtgtttggcctagcccccagtgttaatggcaaaatcctatgaatctttgtgctggaaattcaagaccctcccttgtctgagtcaggcacacgcaggccatgtgggctcagaccccagtctggaacctccccttcagcaagagcccttggccccagagcccagaggtttttgttttgttgtgttttgttctttgagacagagtctcgctctgttgccccggctggaatgcagtggcacgatctcggctcactgcaacctccacctcccgggttcaaacaattcacctgcttcagcgtcccgagtagctggtactacaggcgcccgccaccacgcccggctaatttttgtattattattttttgagatggggtctcactctgttgccaggctggagtgccatggcgtgatctcagctcactgcaacctccgcctcactggttcaagcgattctcctgcctcagcctcccgagtagctgggactacaggcacgtgccatcatgcccagccaatttttttttttgtattttttgtagagctggggtttcactctgttggccaggctggtcctgatctcttgacctcatgatgcgaccacctttgcctcccagagtgctgggattacagacgtgagccaccacacccggcctaatttctgtatttttagtagagacggggtttcaccatattggccaggctggtctcaaacccctgacctcaagtgatccgcctgccttggcctcccaaagtgctgggaacacaggcgtgagccaccgcacccagcaggcttttttcttttatcagttttccaattagccattgtaaaacctatcaatcagtgtcattaagcccattcttgctgttgtacaaccgtcaccactatccatagtccatacctttctcattcccccggacagaaaccgcaccccgcacatgccacttctcacccctccaacccccggcccccggcacccatgcatccccttcctgtctctggattggcctgtcctggacatttcgtagaaatgggctcacacggccgggcgcagtggctcaggccggtaatccccacactttgcgaggcctaggcagaaggatcatgaggtcagggtttcgagaccagcctgaccaacatggtgaaaccctgtctctactaaaaatacaaaaatgagccaggagtggtggctcatgcctgtaatcccagctactcaggaggctgaggcaggagaatcgcttgaacttgggaggcggaggtggcagtgagccgagatggtgccactgcactccagcctgggcgacagggtgagactccgtctcggaaaaaaaaagaaatggcttctctcactgaacgtgacgtcctcaaggggcatctgcgccgtggcctgggtcagagcctcactccttttcgtggctgagtcgtgttccatggtggacgggtcgcgccgtgtttgtccctccgtttggtgatgggcacctgggctgcctctgcctttttgctactgtggatcgagctggtgtgaacacagcggagtggtcgtcgtccgcagtcgagctggtgtgaacacggtggggtggttgtcgtccgcaatcaagctggtgtgaacacggcggggtgctcgtccgtccttgttttcatttctttgggtataatctcggggcagggagaggctggtaattttatgtctttttaaggagccacccgtgtttgctccgagtcgttttgattttcattttctcgatagcgaaagggttgggcatctgtccagtagccatttgctgaccctctatgacctcctgtgtggacgcggcactcccagcaccgtgtctggcccgccatacgcaggccctgaaccgacaggaccttttctgccagagcttcccagggagagttttgggatccaccttggggacttggactctggccgggtgtatctgggagtggaaacgccctctggtctcttgtccacgggtatttatcatacggaacgtccgaatggtgccaagtccggctcggccgttcctcccaccctctcggcctcccctgtggcgccagccccgtctctgcttggcttccctccctcctgtgtggacgccccacttcctcccctctcctcctgcgtggacgccccactccctcctctctcctcctgcgtggacgccccacttcctcctctcctgcgtggacgccccactccctcctctctcctcctgcgtggacgccccactccctcctctctcctcctgcgtggacgccccactccctcctctctcctcctgcgtggacgccccactccctcctctctcctcctgcgtggacgccccactccctcctctctcctcctgcgtggacgccccacttcctcctctcctgcgtggacgccccactccctcctctctcctcctgcgtggacgccccacttcctcctctctcctcctgcgtggacgccccacttcctctggaaatgcagccggtgctgccctggttcagtcttcctgtggcccctgtggaggctcccgcttctcagtaaggcatctggggccctcacctcccggcgtgagctgagcacggttcatttcccaccctggcttcccgccttcgctctccctgtgcgcgccgccctgcctcgccctgctgcttcccagtgcccctctgcaccccggctcctctctgctcctctgctgtcctgtcctgtctatttttttaacgccaaccttgtgccaggcacattgtccctctctggtcatgtgaagcacttaatctattttgagccacctcttgggccttgtgaggtctcctgcatcttcaaggacacggggtcaaagttgggcctgaggaagggacctgggctagggcagcgcagtgggcgttgggctccctcggggctgggtggccttcctggggtgggagcctggtcccgagggaggagtgcccagggcttgtcctgcaggcgcctggggggaaggcaccggcctgagctgtgggcaccctcgtcccccagggaggaatgcccggggctggtcctgcaggcgcctggggggaaggcaccggcctgaggtgtgggcaccctcgccccccagggaggaatgcccggggctggtcccataggtgcctgggggaaggcaccagcttgaggtgtgggtgcccctcgtcccacagggaagagggcccggggctggtcccataggtgcctgggggaatgcaccagcctgagctgtgggcaccctcgccccccagggaggaatgcccggggctggtcccataggtgcctggggggaaggcaccagcctgaggtgtgggcaccctcgccccccagggaggaatgcccggggctggtcccataggtgcctgggggaaggcaccagcctgaggtgtgggtgcccctcgtcccacagggaagagggcccggggctggtcccgcaggctcctcggaggaggcactggctcgaggtgtgggcgcccctcgtcccccaaggaagagtgcccggggctggtcccgcaggtgccccggggaggcaccggcctgaggtgtgggcaccctcgcccccaggttctactgggacttcaccatgctgctgttcatggtgggaaacctcatcatcatcccagtgggcatcaccttcttcaaggatgagaccactgccccgtggatcgtgttcaacgtggtctcggacaccttcttcctcatggacctggtgttgaacttccgcaccggcattgtgatcgaggacaacacggagatcatcctggaccccgagaagatcaagaagaagtatctgcgcacgtggttcgtggtggacttcgtgtcctccatccccgtggactacatcttccttatcgtggagaagggcattgactccgaggtctacaagacggcacgcgccctgcgcatcgtgcgcttcaccaagatcctcagcctcctgcggctgctgcgcctctcacgcctgatccgctacatccatcagtgggaggaggtgaggtggggcgggggcggggccaaggcagcaggggcggggctataatggtgcatgggcggggccaaggcagcaggggcggggctataatggtgcatgggtggggccaaggcagcaggggtggggctatgagagatctgggtggggtcaaggccccaggggtggggctatgggagatctgggtggggtcaaggccccagggatggggctatgagagatctgagtggggtcaaggccccagggatggggctatgagagatctgggtggggtcaaggccccaggggtggggctatgggagatctgggtggggtcaaggccccagggatggggctatgagagatctgggtggggtcaaggccccaggggtggggctatgagggtgcaggggtggagctacaatggtgcagtggtagagccaagacagcaggggtggggctatcaggttgctgagcagggtcgaggcagcaggggcagggctatgatgctgctggggtggagtcaagcagcaggggtggggccgtgatatctgggtggggtcaaggagcaggggcagggctgtgagggtgctgggcggggtcaaggcatcaggggcggggctatgagggttgtgctgagcggggtcagacatccgagtggagatatgagggttgtgctgggcggggtcaggcagcaagggcgggactatgagggttgtgctgggcggggtcaggcagcaggggcggggcaatgcgggttttgctggggcagggccagacatcaggggtggggatatgagggttgtgctggggcggtgtcagacatcaggggtggggagctgtggatttggggggtgtcctagggcgggggctgtggatttgggggggtcctgcagtgaaggctgtagaggtgggcggggtcctggggtgggggctgtgggtttggagggcgggggtcccggggcagggctgcagggtggggcgggggtcctgtgcggggccttggatttgggggagggggccaggagctcccgcagtgggggcgcacggggctggggctctgaaggtgggggccgggggtcagcgggtagggtgggctcacggcgccttcctgcagatcttccacatgacctatgacctggccagcgcggtgatgaggatctgcaatctcatcagcatgatgctgctgctctgccactgggacggctgcctgcagttcctggtgcctatgctgcaggacttcccgcgcaactgctgggtgtccatcaatggcatggtggtgagcgccgcgggccctgacggagggggagacgcaggctcccatacagaggggggacccaggcccccttatcccgcttacagagggttgaacccaagcctttcagaggtggggacccaggcgcccccttatggaggggaggactcgggcccttacagaggtggggacccaggcgcccccttatggaggggaggactcgggccctttcagaggcggggacccaggcgcccccttatggaggggaggactcgggcccttacagaggtggggacccaggcgcccccttatggaggggaggactcgggccctttcagaggtggggacccaggcgcccccttatggaggggaggactcgggccctttcagaggtggggacccaggcgcccccttatggaggggaggactcgggcccttacagaggtggggacccaggcgcccccttatggaggggaggactcgggcccttacagaggtggggacccaggcgcccccttatggaggggaggactcgggcccttacagaggtggggacccaggcgcccccttatggagggaaggactcgggcccttacagaggcggggacccaggccgccttacagagggagagacacaggcccttcaggggtggggacaagacccccttacacgggaggactcaggcctctttacagagggggacccaggactgcagccccggcactggccccttaatgtccctgggggtctgaaacagccacttggaacctttcaggcctgggatcatccgtggagagaagctgagtgtggttatgatgagtcctgtcacccagacatctgcttagcgcgttttccaatggatttcccttttaattaacccacattaattattattattttatttacttatttttttttgagactgagtttcactctgtcgcccaggctggagtgcagtggcacgatctcggcttaccacaaaccccacctcccagggttcaagggattctctcgcctcagcctcccgagtagctgggactacaggcgcccgccaccacacctggataattttcgtacttttagtagagacggggtctcgccatgttggtcaggctggtctcgaactcctgacctcaggtgatccgcctgcctcggcctcccaaagtgttgggattacaggcgtgagccaccgcgcccggcctggttggatcccttgagcccagaagttgaggctgcagtgagccatgattgcaccactgcactccagcctgggtcacagagcaagacctgatctctaacaactaaagaaaaatttacaacatggccctgaattgggaaagtggtatcaccatgccaaagaaataataaatgggccaggcatggctgctcatgcctgtaatcccagcactttgggaggctgaggcaggcggatcacctgaggtcaggagtttgagaccagcctgaccaacatgctgaaaccccgtctctactaaaaataaaaaattagccaggcgtggtggcgcgcacctgtaattccagctactgtagaggctgaggcaggagaatcgcttgaacccgggagcagaggttgcagcgagctgagatcacaccattgcactccagcctgggcaacagagccagactttgt[144 bp omitted]gagaaaccccgtctctactaaaaatacaaaactagcttggcgtggtggcgcatgcctgtaatcccagctacttgagaggccaaggcaggagaatcgcttgaacccgggagcggaggctgccgtgagccaagatcgtgccactgcactccagcctgggcgacaagagcgaaactccgtcaaaaaagaaggaataataaatgaagttaggtcccagatactccttgcttcctagctgagatgtgctgactgttaagaagggttagttatgggagccctcggccgctacagtcaggttagtggccagtgagcctttgtccctgcctggggagtgctgtgccccagcgtccagccacatatgggacttgggatgtgtttggtttggacacagagcaggtgggcattgatggggtcaggagctacagagggaagacccgccagtgcccctccccagagcctggcacagctgcccaggctgaggcagcccattgtctggctgccacccgcacatgcggtcccatttcctgaacagagccccgcggctcccctttcccggccgggtcagctgaggacttggtgcggcaggacctcctgggccggcctggtgtctctgcccgccctgcccctctgctctggcccagatgctccctggaacttttgccccctcttgacctcacagatgctctgatctcagaggctgcaaaaggcgggacccagactctcgcccttggggtctcagtttccccaggagtgaagcgggcaggtagaatcagccctggccctcctgccaactcactgtgacaagtgtgcaaaccatgtcatctacctgggtctccatttctcttggttacctctgaacatggggagctcaccacctccagtgcttggcagagggtgggcgctgggcccttgaggaccgagggctcctggggcgtgagcacctgcccaccaccgcccctcctgctggccttgcagaaccactcgtggagtgaactgtactccttcgcactcttcaaggccatgagccacatgctgtgcatcgggtacggccggcaggcgcccgagagcatgacggacatctggctgaccatgctcagcatgattgtgggtgccacctgctacgccatgttcatcggccacgccactgccctcatccagtcgctggactcctcgcggcgccagtaccaggagaaggtctgagggaggcgggccccggcctgggttctgatgggggaggcgggcctggatctggggtctgagagagagtcaggccaggccctggggtctgatggagggaggcaggcccggtcctggggtctgaggctggagggaggccttgccctggggtctgagggcggaggtagtccttgtcccggggtctgaggggaggggcgggcccggccccggggtctgaggggagaggcagtctcagcccttcactcagcttcaagtggcgcgctcagggcagagaccgcgtgatggggagcaggggaccctgggggtctgtggctgtgattaggaggagaaacggccggtggtgagaggttctctgaccctgtgacagggagggaggtccagagcctggagatggacgtggggcgggggctggggaggggatgcaggctgggcaggaaggggtgagttgggatcagggcaggacagggtcagtctttggacatcgggaagcccccgggctgaaggggcattgccaggaggctgggcccacctgggggtctctaggccggctcaggatggggctgggttagggaagggcctggcggggtctgagaggcctggggttgcttcaggacacgccggtggccggcagtcagggccaggcttcagggagagcaaggctgccccactgctcagatgcggcctctggcctgcagcgtccattgggttaatcctaggcttggcagtggaggggacacgggggagctgggaggggtggagggagattaggattggccccattggcagcccctggagttgggcctcatgcaccactctgtgcctcagtttccccatgttaggcggctggctggtcctggctgggagccaagtgcccccctctcccgcgccccgagcagtggctggctgggtcagctgggccccgtgccaggcgccctgctgtccggaagccacgggcctcacacccaaacataagctggtgccaccacccgcccgccgtcacgggttccgctgagctcagggcagctgcggccgggcggggctggggcggaagtgaggctggagctgccggggggcaccgtcctggggacagcagggcctggcacccccgcccagcacccacgctcccttccctgctcaggaggggctgacccgatggtttctggaaagatcatcagggaagggccagagcccccgggaagggggtcctgtgtgtcagggtacctggggcctctcctcgtagagtcaggtgcccacccattcctcagggatagggttgctagataaagttcagggcacccggcctggtgcagtggctcctgcctgtaatcccggcactctgggaggccgagacaggccgatcgcctgaggtcaggagtttaagaccagcctgagcaacacggcgagacctcatcgctacaaaaaattaaaaaattagcagggcagggtggtgcacacctgtaatccccactactcaggaggccgaggtgggaggatcccttgagcccaggagttcaagaccagcctgtgcaatatggcgagacctcatctccacaaaaaataaaagaatcagccaggcgtggtggcgcacacctgcagtccctgctactcaggaggctgaggtgggaggattgcttgagcccataggcggaggctgcagtgagctgtgattgcaccactgcactccagcgtgggccacagagcgagacagtgtctcagaaaaaaaaaatggaatttatcattgaaacgaattcaactttgatttaaatagaagcatgtttatttgctcttgttgaatctggccgcccctgtgtgtggcggaggcctgtctccccgctgtgggcgggggctttgtctgacccagccctgaccccccacagtacaagcaggtgtgaaggcctatctccccgccacaggccggggggctgtctgacccacaagcaggtgcccgtgtgcccgctgcaggctgggggcggtgtctgacccagcctcgcctccccacagtacaagcaggtgcccctgtgcccgctgcaggccgggggcggtgtctgacccagcctcgcctcctccccacagtacaagcaggtggagcagtacatgtccttccacaagctgccagctgacttccgccagaagatccacgactactatgagcaccgttaccagggcaagatgtttgacgaggacagcatcctgggcgagctcaacgggcccctgcgggaggtgaggcgggcgccgggcgggcgggaggcagcctccggtacagggccggcctccctctcctggagcccaggagccggtccctgagggaggcgaggtgcctaggctgcagcaggagggactcgagctagacctgcgtacacaccctcccctccccgccccgtgagcctctgcacccccaggacccccgccacccccgccttgcttcccgctgcccccttagcagaactgcctgggtctgtgcctgacagggcggggcagaagcagggcagggggtggggagggaggagccgcagaggccccgctgagcaccaggtcctgggggcactgaggctgattggagcgggtttaactcccagctctgttccggtagcctgagtgaccctgggcaagtttcccagggttgcgggaacaaatacccacaggctgagtggcttgaacagcggagattcggcctcccaccgtcctggaggccggaagcccaacatcaaggcgtgggccgggccgtgctacccccccggagcccctggggaggatccttcctgcctcttccggcgtctggggctccaggcgcccttggcttgcagattgatctccctgatctctgcctccatctgctcacagccttctcccctgtgtgtctctgtctcttcttgtaaattcatccgtcgttggatcagggcccacccggttcctcgtggcctcgccttaactgggccatgtctgcagagaccctatttccacataaggtcctattcacaggaaccgggggtcaggatgtcagcctgtctttctgggagatgtagttcaacccacaacacacatcaaacagttattgagcgccgactgcgtgccctgccgtgtgcttgaaggtcccaccctcaggaagcggggcctagggatggcggccgtgatcacgcaggcagcagagagcagctctgggaagcggggagggacgaggacggggaggcgacatcagcaaggccgtgtgtgagccaggcagggtgtccccggtgtagcacctggctcgggcagaggccccgaggaggggctggaggagctgggcgaggaggcgggcaggacgggcctgacactagggacctcgggccccgggaatgcctctgggggggcgtgtacacccgttgctcccaggaggcacacactgcggttcgcttcgccaagaatgtttaattgcatttgatgactacggtttccattcattcatttgtagagatataacactcagaccacaaaatgcataaaatgcggtggcttttagtattaacagagtgctgcacccgataccacagcctcactccagaacattctcatgggcccaaaaggagacctggggtgttagtcaccagctcactccccgtccccagcccctggcaacccacgctacttagtcattatttaggtgtttaggagttgcaaagtcaaatctttaaacccacatatggccaggcgtggtggctcacgcctgtaatcccagcactttcagaggccgagacgggcagatcacctgaggtcaggagttcgagaccagcctggccaacatggtgaagccccgtctccactaaaaatacaaaattagccgggcgtggtggtgggcgcctgtaatcccagctactctggaggctgagacaggagaatcgcttgaacccaggaggcggcggttgcagtgagccgagattgtgccactgcactccagcctggacaacagagcgagactccgtctcaaaaaaaaaaaaagtaccaaaaagtgccccaggtcataagggcacagctcgatagctggtccctaaagggaacgtggtgtaaccaccacacagaacgaagctggaacgttcctgccgtccttagaagctgcctttgctaaggggaattgccctgacttcccacaccattgattcatctccagacccttggttttcatgttgatttttcaaaaatcacctgatagtctgaccgaatgtagctttccactggtgtgtgtgtgtgtgtgtgtgtgtgtgtgtgtgtgagagagagatggagtctcgctctgtcacccgggctccagtgcagttgtgtgatcttggttcactgtaacctcctcctcccgggttcaagagactcgtgcctcagcctcccgagtagctgggattacaggcacccgccaccacacccagctaattttttgtatttttagtagagatggggtttcaccatgttggccaggctggtctcgaactcctgacatcaggcgatccacccaccttggcctcccagagtgctgggattacaggtgtgagccaccacgcccggccttatttttcccccattttctttttttttttttttgagtcagggtcttgttctgcgctcaggctggagggcagtggtgtggggatcacggctcactgcagcctcgacttcctgcaccaccacgcctggctgttttttttttttccggtagagacgggggtcttaccgtgttgcccaggctggtctagaactcctgggctcaagcgatcctcccgcctcggcctccgcaaatgctgagatcacacgcgtgagcccccgcacccggcctcctttccaccgctcttgtctacagccgcccctcctggtccgattgtattggcagatgtcgccaatacggtgtcaaacggcgaaggggcactgagcgttttttctttctcccgtccttggcggcagcagctcggttccggctacggggctgagcccgtctctcagacgaggaaactggggtccgagaggtgagccggtcccagaggcagggcgagggggaagcgggagtggggtccgcagcggacccagccctgcctcccccctgcaggagatcgtcaacttcaactgccggaagctggtggcctccatgccgctgttcgccaacgccgaccccaacttcgtcacggccatgctgaccaagctcaagttcgaggtcttccagccgggtgactacatcatccgcgaaggcaccatcgggaagaagatgtacttcatccagcacggcgtggtcagcgtgctcactaagggcaacaaggagatgaagctgtccgatggctcctacttcgggggtgagcttgaggggggcgcgcctggagggggagggggcacgcgacccccgcggtgtgcagagccagggggccggggccggggccggggccggggatggggatggggatggggatggggccggggatggggatggggatggggatggggccggggatggggatggggatggggccggggatggggatggggccggggatggggccggggatggggccggggatggggccggggccggcaccagggagagcctgggtgggaagcgcccacgctggccaaggtgcagaggccgggccgtgtgcctgggcggggagggccgcggcgcccgcctcgtccagcaacccccccctgcgcgccacgtgcagagatctgcctgctcacccggggccgccgcacggcgagcgtgcgggctgacacctactgccgcctctattcgctgagcgtggacaacttcaacgaggtgctggaggagtaccccatgatgcggcgcgccttcgagacggtggccatcgaccgcctggaccgcatcggtgagcgggccgggggcgtggccggggcgggtgccctggcgggggaggggcgtggccaaggcatcaggagagtggcttggacagtggcagggggaagggcgtggctgtggcatcaggggcacggttggggcagagacgtggccaaggcatcaggagtgtggccatggcagcaggggcgtggctggggcaggggcagcggctggccgctcctaggacccctttgggtctagaggctgattttctgacctattgtcctacttcagccagaggcagcctgtttcccaagggagggaatgcacagggtgtttgcggttgtgccgaatgctcggtgagcacctgctgtgtgctgggggtgcaggggacagacccgggggcccactcagactcccagggaggcttatggactggtgatgaaatcacacacgactgggctgtgtgccagcagggcaggtggggccggtgggcttccctgagttgggaatgcagagtggagaccagggtaagggatgccatgtggaaacggggaggaagatgtgttcgtggagtggacacagcacatcccaaggccctgaggtggaaaagaggcctagagtccagagagccagggaggcctggaggaggttggggaagaaggggaggccagacacacagggcccagtgggcggcagggagagtttagactaaatcaggagcatcagggagccatggagggttctaggtgggcggaggacctggtcagattgtatccgccaaggcgggccgtgtccaggagggagacggtgacctggcctctcaggggggcagtctctggggcagggaggggcagagccctgatgactggatgtaggcgccagagagatggcggctcatgctgctgttcgtgggaatgggaatgaagaccatggctgaaacgcaggacaggtgcgacggagtggtgtcagggagctccctggtgtacagtaggaagctctccacaacttgctctatacagtgagtatgcaacccgttcctgagtatcaggtgcttaggttataacttctgtatacagcaggtgctcagcacaggctgtgtacaggcaggtgttttcggtatgcctgtggcacactggaggcagtcattacataatcagcgtatacaggtggtacacatgcatacttggtgcacagtgatacctgctccatgtacacagcaggcattaaatacctgtttactgccaggcgcggtggctcacgcctgtagtcccagcactttcggaggccaaggtgggtggatcacgaggtcaggagattgagaccatcctggctaacatggtgaaaccccgtctctactaaaaaaaaaatacaaaaaattagccgggtgtggtggcgggcgcctgtagtcccagctactcgggaggatgaggcaggagaatggtgtgaacccgggaggtggaccttgcagtgggccgagatcgcgccactgcactccagcccgggcgacagagcaagactccgtctcagaaacaaagcaaaacaaaagccctgctttctgtatgcaggtgcttcatgcatgctggctgtgcatagcaggtgctcagcctgtatatggcaggtactcaatatccatactataggccagagatgctacatatgtgcttattgtatacagtaggtggtaaatgcatgcttgctctacacggcaagcactgtgtgcgcacccgcggtgcagagtaggtgctcggtgcccgctgtacgcagcaggcgctccctgtgcacacgctaacgccccctctcccgcaggcaagaagaattccatcctcctgcacaaggtgcagcatgacctcaactcgggcgtattcaacaaccaggagaacgccatcatccaggagatcgtcaagtacgaccgcgagatggtgcagcaggccgagctgggtcagcgcgtgggcctcttcccgccgccgccgccgccgccgcaggtcacctcggccatcgccacgctgcagcaggcggcggccatgagcttctgcccgcaggtggcgcggccgctcgtggggccgctggcgctcggctcgccgcgcctcgtgcgccgcccgcccccggggcccgcacctgccgccgcctcacccgggcccccgccccccgccagccccccgggcgcgcccgccagcccccgggcaccgcggacctcgccctacggcggcctgcccgccgccccccttgctgggcccgccctgcccgcgcgccgcctgagccgcgcgtcgcgcccactgtccgcctcgcagccctcgctgcctcacggcgcccccggccccgcggcctccacacgcccggccagcagctccacaccgcgcttggggcccacgcccgctgcccgggccgccgcgcccagcccggaccgcagggactcggcctcacccggcgccgccggcggcctggacccccaggactccgcgcgctcgcgcctctcgtccaacttgtgaccctcgccgaccgccccgcgggcccaggcgggccgggggcggggccgtcatccagaccaaagccatgccattgcgctgccccggccgccagtccgcccagaagccatagacgagacgtaggtagccgtagttggacggacgggcagggccggcggggcagccccctccgcgcccccggccgtcccccctcatcgccccgcgcccacccccatcgcccctgcccccggcggcggcctcgcgtgcgagggggctcccttcacctcggtgcctcagttcccccagctgtaagacagggacggggcggcccagtggctgagaggagccggctgtggagccccgcccgccccccaccctctaggtggcccccgtccgaggaggatcgttttctaagtgcaatacttggcccgccggcttcccgctgcccccatcgcgctcacgcaataaccggcccggcccccgtccgcgcgcgtcccccggtgacctcggggagcagcaccccgcctccctccagcactggcaccgagaggcaggcctggctgcgcagggcgcgggggggaggctggggtcccgccgccgtgatgaatgtactgacgagccgaggcagcagtgcccccaccgtggccccccacgccccattaacccccacacccccattccgcgcaataaacgacagcattggcgccaagcctggccgcgtgtgattgcccgagacccgcagggcgtgcacccttcctgaagacagtggctcctgggggtggcaaaagagctttatttacacactgacaaggctcacggggtgtcagctgaagaagtaggtggaacgcttcacctgctccaggtcgaaggcccctgcggaggaagcagagcggacggcgtgggtggcgggaaagccccgccctggcccgcagttcgagccacccttgcgaggctgcccacccgcctacctggcttgggcaccgcctgcagtgtctccttcagctggctggcctccaagatcttctggggcctggggttggaagcagggtggggtgaggctgaggccaggttttggggtggggggggaatccaggtagttggggtcagggagcgccttactcagagcagaaccgcttgaccaggaatctggacaggtcctgcaggatgggctcgctgtgcaagcggacaaactgctcccggcacacctgggcaggagtcagaggatccccaggggtgatcaggcaggctctgggcaccacccctacccaacgccccagtgtgggggccccacccatgggtggactgaggctcagactacgggggcacctggttcatgacggagacatcagctgcgtgagtccagtaacagtcgtgcacagagacgaaggtcaggcccttcctgtggcagagcggaggactcctgaagggaggggagctcacagggccacccagtgaccagcatcctggccctgcgctcagccccctccacttgaggtccagggaagcccaccctcctgcaggcctcgccccacccctcgccccgcccctccccaaacatcctgggttaggtatcagtacagggggaggaaatgttcccagaagcctcctcgccccacccctgccgccccccacgctgctgtgggagcctcagctccgagggcggctacgaggtcccctcctgccagggccaccaccccgcatcctgagcattcccagctcccgtggccggtagattctgctggaacgacctccacgtgctccagatctaaccacacatcgcggtgccaagaaatgcccagcaggaaggggcagcgcccatgctcggctctccctgtcgggccacaggaggggagctgccaggaccacctacattcggggcacacagcctcagggcctctacacaggccccacagacacagcagatccactctgcccagtccctgcccccagctagacccagccttgccagctgtgccctgctagccagaagacgcccctgggaggcgagcggcacccacgccgtccggagacgcccacctgtagcagtgcagggcggtgagcatcatgtgggaggagtccagcgagtggatgaagttgggcgggaagccgttcttctgcttacgtgtgttgggctttctgaggacggaacaggtgccggtgggggcggcccagggacacccctaactggccgctgtctccaccgtggctgctctccagacccccggccaggccccagcccgggccccccactcaccggctgatgtctccgttgtgggtgtaggtgatgctctgaattccacctcctatttgctaaaaaggggaaggggccggtgagtcccacccgaggcccagcacggtggtggtacattgaggtggtggtacactggggtagtggcacgctaggatggtggcacactggcgcgggatggggtggcacactggggcggtggtacactggggtggtggtacgctggggcactggtacactgggacgctgttacactgggatggtggcacactggggagggatggggtggtacactgaccttgaccttggagtccaggcgatagggctggatgacggggacgcccaggggtgtgacccactccaccacagagcccatgtgggagatgaggcgggcactctcggtcagccagtgctgtgggacacaggccgtctcagggcagggggctcaggccggggatcccgtccacttgcttagggagtcctggccgagcggggacaggacaggacgtacctggatggcccgggtccccgagaacatctcctgtagactcttgaagacctggcgtacgagatagtgagaggcctcccacacgaactcctgcagagggcgggcagcaggtgcaggtcctcaggggctggcccgttcacgccctactcccccctatttcagagccactgaggcccaaggcctagggcctagcaggggggcaggggaatggggcctggcgcccacgcagtcagcaagaaacgcccaagccctaacaggcagccagtggtctgggggagcagccagggctcctgctgggaggctgggtcgggggcacacccgtctgagttttaaatggcagtgaaaccaacgtgttcgcagcgcgacatgcctggcgcacctggggaaagtcgctcagctcccggaggcgcttctcaatctgcaggcgcccgccatagcgcgtgaccccgtacaccaccgtcatcaccgtctgcttcaccaccttgcgggtgatgaaaccttccagcacctgtgccacccgcatgccccgctgggcgtcctgcctacggaacacctccacctgcacggcgggtgggccgggggcgcgggtcagccccgctagcagcccaggggccaccaagcacccatgaagcccccgccccagccccaccacatcctcaggacaggccaaggtgagggcacctggggccgagactcagggctcacattgcccccacgccgagatgcccccgggcagcagggcacaccctacctgcgcggccacgccgctgtacacgtcctgcggcacatccgagggctccaggttgacggaggcggcgcccacgctgtcgcggcccagagcagcataatgctgcaggccgttgcaagagccgtcctgaggaaggggcggcaaacgggagatggaagctagagaggcagagacgtgtgggaccccaaaccaccccccaggtcgagccgttcctagggccgtgcaccccccagccaagtgcaccggagcccccgcacgctcccgggagagaccaggagccatggctcccgcacactctaggaccacctccagagaataccacgagcgaaggtgaaatctcacaccctcaagtcgagccccaggcccagtgcacactgcacggcctcgggggccagacccagctggctcacctgatggacggggaggtgggagacataggcggcagggtcggaggcgcgcacagcgttcgccacctccatacagcaggccagcgtctgccagggttcctccgcgcccatccaccactttcggccctgcggggacagcggatggggggcagtgaggcccgggcccgatccctgagcccgctgggaggctgtgttgcggggaggtgggaaatggggaggagacgcacacccgtgatagtgaacacgggacgcatgtgggcgagagacggggcggtggctggatgagttctccatagccacggatggaggatgggagctgcgggtggaccgggctgaaacaagcgtgtccggagctgccgggggaggagggtggacagaggacctgggggcgccgggggaggaagcagctcggcggatgcaggggaggggggaacgtggggaacgcgggggccctggggcaggggagaagggagaagcaggacgggcagggggcgcgggggaggagagcgggcgggggacgtgggggcgccaggggagggggaggggaggaggaagacgggcagggggcgccaggggagggggaggggaggaggaagacgggcagggggcgcgggggcgccgggggagggcgcgggggcgccgggggagggcgcgggggtgccgggagggcggggaatgcgggggccccgcccctaccgtcaagggttggtccgcggagtccaggatgtcatccatcacctcctccgcaaaggccaggcgcttccgcagcggctcccgcttcttcaaccccgtgagattgaccaggtggatcttgagccaatccaggccgtgcgggccgagcgggcggccctgggcgaactccagcagggcccgcgccacgtcgctgcccaggtggttgaagtgcggcgggcaggggtaggtgcggccgcggaagtccatgttgtgcggcagccagaagacgcggtcccgcaggtgctgcgccagcgagaggcggtacagcgcctccgcccgcaggctgtgcatctcccgggccaccttctggcagtgcgccagctcacggcgcagctcggccttgcgggcgggcgcggcgctgtgcggcaggtgggcctcgggcggctggggcgcctcggagggcggggccggcacgcctagctgggggcagcccttggcctggaagagctgcagcaccaggtccagcacgcgcccgttgacgcgccaggcgcagttgcccagttgggtgagggcgtccagtgcgccatgcagcgcggtgggcgggcaggtttccagcagctcctggtgctgcgtggcgccttccaccgtgcgcatcagcttggtggggctgagcaggaaagcaccagagtgcggcgatgtccagggcagcggggggcaaagcatgggtacatccaccgcctcgaaggtcagcgtgggctccgcggccttctccagcagctgcacgtaggccgggtgcggcttcaggatgccgatctggggtgcgacaggcagacgggtcagggccccggtgctggggctttcctgttcccaccccttaaacttgggtgagaggggccggctccccggccaacaagaaaccagtgtggcctcccacgaacagaagccacctccagaaacggccggacacctgcatggacacccatggtgtgtcccgagtcctgggaggtactgacggctgcgctgagatcaaggctccgcccaaaggcgccaaccccatggggtccctggtcctcccagcgggatgccccccagctcaggagggcactgcctggcacctgctggacgttgcggaaggaatacacgtggtagagcacggggacaagccgagaggaacgatgcggcttgtccaggctgcatggcatctgcgtagcctgcaccagcatctccgccagcagcttgcccagctccatctgcactggcaggggccagggctgctcccgcagggcctcgggcgcccccagctcctcccagtactgccgcggcaggcagggctcgggcacctgtaggacagggcggtcagggcgctgggcaccggggcccctgagctagatgccccaccgcccgtgcctgacgcccggtggggcatctgtcagcccaagcatacagatgaacagactgaagcttgggtgcaaacccggctgctccagggagggagagcgcccacccaccactggccccagccaggaggagagggggtgcgagcctcacctcggcgtcggaggccagcaagcagaggtacttcctgtagtggttctgcagcgcctgcacctggccactgacccgctgcctctgcaccacgtgccggctgaaagtgcgcgcactcagctcccgggccagggtggtgaaggactcaccttgggcgggcagcgcctgcaggacctgcggaaggcagccgtgagtgcctgcccgccccgcccggggacccggccgcgcggaggaagacgcacctgcaggagcatccgcaccacctcgcgctcgtccagcaggcacaggaaggggtaaagtgagaaccggccctcgtacacctcgcgctctaggcggttcttggtctcccgcagcgcccggcacagtgctttctcccattggtcccgcagggtcttcagggtcttccgctgcgggggatgaacgggcccggtgagccccgtggcagctggtgggacccaggctcacaggacgggggtcaccgcagctccctgcagagacctcatggccctcaaggtccctgctgtgtgttccgggtagctcctcaccccggcctgccctctgccggcttcagcgtgcctgacgcagccaagagcaaaagcccagctgcagtgtgcgcagaagcacaggccaagacccaacctcgggaccccacaagttttccctgagcggcagccaggctgagttcctaggccctgcatgaccagaccagggcatgagcaattcaaccgcatacacggagctcagcccctgcggcggacacgcgaccccggctcagcccctgcggcggacacgggaccccggctcagcccgtgcggtggacacgcgaccccggctcagcccctgcggcggacacgggaccccggctcagcccctaccgcgtgcttgacctccttgcttggcaacgtgggcttctccacggacaccacgcacaccctgctggccagctccatgtggagctgcttctcaaagaggcactgcagggtcttcaagggcaggtgcagcttcgggtaggacacacgcccatcctgcagggatgggggtagtgaggttgggggcttgccagagggcgacctgccctcccaggaccccgagacagcatgggtgcacgcgtttctgcgtctcctgcaagttgctggtggctatcgctgacgcggggaaaggcgggctgcgggtaaagtcagtgccagcagtgcaaaccaaaggccttgaccctcctggcctcgacccctctagaagggacactgggcaccgtgcagggggtggcaggggcggtgatgctgggagctggcagagcctggggagaccgttcactgcacccccagatgttggctgttttctcctcaaactcagaactgtatgaatgtgacccatccagaaatagatgaattaaaaataacaactaaagcctagcgctttgagaatcaaagacgcacgtccacataaaagcttgtacacaaacgttcacagctgcatgactcgcagtcgataagtagaaacagcccaacgtcccataaacggacgaacagacgggcacggcgcggccatccacgcaccggagcatgactcagccctgacccaggtcgcctcccggaggcaccatgaggacgtcacgctcagtgggagatgccaaacacaaaaggtctcgcagtgtgtggtcccatttctatggaatgtccagagcagactcatccacagatggggaggggatggggagtgacggggatggggacgaggcttccttttagggtgatggaacattctagaattagacaaccgtgactacactaaaatcgctgaattacacctttaagagggttttatggcaggtgaattacacctcagtaacagacgagcccactgcgtgcacctggcagccccactcaaacgcactgctctcctgtcaccccaccctctctctgcggcccccgaccacctcgtccccctgagcccacaccctcagggccaagaccctcccagctctgggtcctcccatcttctcagaggaggaagggaggaattcagggcccagcccaggtgagccctgggcaccggggaggcccattggtctgagctgaggctccaggaacccccaaagggcagctataaggactgaagtctgccggggcccacgtgggctcaccttggcatacacgtccctgagcagcttggaggtgttgaccgggggcggcagctgcggcgggaggctgaaggtgggcttcaccttgtgcacggccttcagaacagtggcccgatcctcctcagacagcagaacggcggtgaagagtgcctgcagcttcagcccctcctggctcatctgttccagacacctgtggtgcaggcggcctgctcgagggacgggccagccccacgctgggcttccacagaccccaggggaacctcgtgaccacctcctgctagcctgcaggtctcggtgtggctgtcaggccctctgggggtccccagcccccagcccaggcaccgtcccagatcttaaaaccctgggagggacatggtggggggtgggggccctcccgacaccacctacctttcgatggtcccggcgtcctggtcctgcctccccatgcactggagggcagccgcataggacagcaggtccggagtcaagccggcatccttcaccatgaataacacatataccagctccttgaaggcaccctgggagaccaagccagggtgagggtctggggggatggcccaacctccacatcctccctgctccctggagaccccttctctgtagccaccagctcagcaggggacagggtcaccaggcaggagtggccagctgggcagaccgatgcatccccctgaggttctgacacacaagctccacctgcagaggcagccgcatggcccgccaggtgggactgtgggaggttcacgttcctctgggaggcagcttgttaaacctccagatttgtcaattgtgtggatcttttcaaaggactgacttggcttgactgttctctgctgtttctgccttccatttcatcgatttgttttaatctttgtaacttcctctcatctacttgctttaggtttagtgacagcttcttcttctagtttcctaaggtgaaaggtgacgtatttggtctgagatgtttcactttttttccccccaagatggagtcttgctctgttgcccaggctggagtgcagtggcacaatctcagctgggccgggttctctgcctcccaggttccagcacttctcctgcctcagcctcctgagtagctgggattacaggcacacgccaccacaccagctaattttttgtattcttagcagatacggggtttcaccatgctggccaggctggtctcgaactcctgacatcgtgatccgccagcctcagcctcccaaagtgctgggatgacaggtgtgcaccaccgcgcccggccatcacctttccgaatataggcattttgtgactataaattaccctgcgagcactgtgtcagctgcatcccaggacttctgacaggtggtgttttcattttcattatctccaagtgttttcgaac[140 bp omitted]gcctcagcctcctgagtagctgggactacaggcacatgccaccacacccagctaattattttgtatttttagtagaga[141 bp omitted]ttttttttttcatttaatttttggccaggcacagtggctcatgcctgtaaccccagcactttgggaggccaagacaggaggatcacaaggtcaggagtttaagaccagcctggccaacatagtgaaaccccatctccactaaaaatacaaaaaaaaaaaaaaaaaattagctgggcgtggtggctcatgcctgtgctccctccactaaaaatacaaaaaaaaaaaaaaattagctgggcgtggtggcacatgcctgtaatctcagctactgggagcctggggcaggagaatcacttgaacgcagaaagcggaaattgcggtaagccgggatctcaccactgcactccagcctgggagacagaaactttgctgtcgacagacttggagactctgtcttaaaatatacacacacacacatatatatatatatataaaataacatatatatataatttttttcttgtattcatttttcctgacatccctgttctgagcaatttctcctttgacccagtggctgcttaagagtggcctgtaactgtaacagactattccaaagggaaaaaaattcccttacatcctcccaccccatagtcctgcagctgaagacatgctgtgacatgaggtggccacacaccagaga[137 bp omitted]tgcctcagcctcccaagtagctgggactgcaggcgcccgccaccacacccggctaattttttgtatatttttagtagagacggggtttcact[136 bp omitted]cctcactggccacacatagtccttaaattgaaatattcagttcttccctttcaccagcttcaagtgttcagtagcacacacagctgttggcagatgcggaaaattcccaacatcatagaaagttctactggatggtgctggttagaatacgtggccgggcgcggtcgctcacgcctgtaatcccagcacttagggaggctgaggcgggcggattacctgaggtcaggagtttgagaccagcccggccaacatggcaaaagcccgtctctactaaaaatacaaaaattggccgggcgtggtggtgagtccctgtaatcccagccactcaggaggctgcggcagggagaattattgaacccaggaggcggaggctgtagtgagccgagatcatggcactgcaccctagcctgggcaacagacagagagtctatctcaaaaaaaaaaaaaaaaaaaagatagaagcaatgccttagcctggctaacatgctgaaaccccacctctactaaaaataaaaattaaaacaattatccgggggtggtggcacacgcctgtaatcccagctgctcgggaggctgagctcgcagtccagcgacatccaggactgctggccaccccggaacgctgggagaggcaggaggggcccctgctagagcctctggagagacttcgggtctgcagacatcttgattccagacttctgggctcgtgctaagagtgcgtttctgctgtgcaagccgccaggtttgggacactttcgtaggggccgatcccaaaagcgccctgttacagtgtgggctctctgcccagggaatccagggggcttgtgaccttggaggggaaaatacacgaccctcatcctcagtcctcccggagtctggcgccccctgcagcaaggaggaaccaggcagcacgccgcctccacctcgcggtaagagcactgcggacttcaccgcaagactggccccacctgatcctgaatttcgctgtttgatgcgttaataaagaagcacatcaagttctctaccacgaattggtcttaatattgcgatatctgtattttaatataatagtatcccatgtttacccaaatattaagagaagcttttactgttgtttctcaaattagggctgaaggatcatggggggggagaaagctgggaacgtttgctgctttgaaagggtgtgtaaacaacaccctccaaaacaaccaagagttccgaggagaaactttggccggatacggtggctcacgcctgtaatctcagctcctcgggaggctcaggggggcagatcacgaggtcaggagtttgagaccagcttggccaacacggtgaaacccccgtctctactcaaaatacaaaaattaatcgggggtggtggcgggcacctgtaactccagctacttaggaggctgaggcaggataatcacttgaacctgggaggtggaggtggccatgagccgagatcgcaccaccgcactccaacctagtaacagggagagtatgtcccagaaaacaaataaataaacaaacaaaaagaaaacggcaagggaaattggaaaatactccagatgaaccacaacgaagatgggtgggatacatctaaagctgtgctcagagggaatgcggcgccagtgaacacccacatttcacacagaaggatctcagcacagcagcccgaccttccacctcaggaaaccagaaaaaggagcaaagtcaaccccaacaccaaagcctcatcctgacgagggctctgcaggctgccccccgacgaggccaaaagcacccctgcccagacagattcacgagccccgagaaagaacggaaggaaatgctcaaggcattagcagaatttctccctacttttttggtcattttcaaaatttgagagtcacacgtgatttgtatttgaaaagcctaaaagaattattaaaataaaaaacaaaggacttgaacctgggggctaagagagaaaagtccagtctaaatgagggcaagttcctgtctccaacgaccagggcaggtggcccggctcccggctgcactcacctgccgcgcccagccaagcatcacggcgttgtacatgtccagcgtgagcagcttccgcttctgccgctggccgtggtggacgaccagcaggtggtgggcgaggggcagctggtcagtgagcaggcagcacttgaagaaggccaggagcctctgctgctgacctgagagctgggcctgcgagtgctgccccgacggggcctgctccacatcgaggctcagcttcccaggggcctcctgcagcagccgggccagctgctcctcccaggggctctcgggggcctggcgcgtgcagtcctccaggcacccggccatctgcttgctcaggagccggggctccacctgcaggcgcctggtcagcgccttgaactccccgctctggaatggcatctgcagcttcgccttcaaccgctgcatacgcatctgctgggtccgcttatccttctccagtatctttgcccagcggccacagggcaccggggtggcatccttggcccccatctggaccttcctgggtggctggaggctaccatctccactgccacattctgggagccgcgccacatccaccctgttcaccaccacctccgacacgctctcagcctgcagctgccgcacccgcgcctggagcactgtgaggggcagaaggcgaggacatgagagggaccccctccccattcgagcacccgtctctctggaccctgagccaggccaggaggtgcaggtggctgagctcgctgggacccaaggcgtgaattcctcatacttgccaacaacgttgtaaggtctgcccgctgctttccagacacacgcaccccaccacctccgcacctccccacccgagcctcacagaactcagcagccctaacaagctgccaccgaaacctgcagcaccacgtctccccggtcactggccgctcagaccctccaggtgcacaggcccagaacccggggtctgtgacaactccctccgtccacctctcagtacctcctctgggcttgcctccagaatctatccaggtggcccccgcctcccctgcccctctcactgtctagctcagggcctctgcacagactcccaggaccctgaaccgcccactccctggctcaaccatggcctgcaagttcgcaccccgcctcagcaagacccccccagctggtggagctgccacacacacactcctaggctcccagtgtctacaccggtggacgctgagccactagctcgcagggaaaacgcggctcctgctcgtgccgcctcaggttgcatttttgccaaccaatcaatgcctaagtgttctgtatctctttaaagaagccttgttggaaatctattgctggccgggcatggcggctcacgtcggtcatcccagcactttgggaggccgaggcaggaagatcacctaaggtcaggagttcgagaccagcctggccaacatggtgaaaccccgtctctattagaaatccaaaaaattagctgggcgtggtggcatgtgtctatagtaccagctacttgggaggctgaggcaggagaattgcttgagcctgggaggcagaggttgcagtgactcaagatagcgccattgaactccagcctgggcaacagaacaataatccatctaaaaaaaaaagactgttgaaataagccgggtacagggccgcgcacctgtggtcccagctactccggtggctgaggtgaaagaatcacctaagcctaggagttcctggctgctgtgagccgtgatcaggccaccgtgctgcagcctgagagacagagcaggaccctgtctcaaaaaaaaaaagggggggggggacccaggtgtccagatgtggtggctcacgcctgtaatcccagcactttaggaggccgaggcaggcggatcacgaggtcaggagatcaagaccatcctggctaacacggtgaaaccccgtccctactaaaaatacgaaaaattaaccgggcgtggtggtgcgcgcctgtagttccagctactcgggaggttgaggcaggagaattgcttgaactcgggaggcggaggctgcagtgagccaagatcgcaccattgcactccagcctagcaacagattgagaatccgtctcaagaaaaaaaaaattgctgaaataaaaagacaagcgtgatgtccgccttcagagtgctccaaaactcaggagatacttttaggattaacagttgagagctttgttttgttttgttttgtttttgagatggaatttccctcgttgcccaggctagagtgcaatggcatgatctcggctcaccgcaacctccaccttccgggttcaagcgattctcctgtctcagtctccccgggttcaagcgattttcctgcctcagcctcctgagtagctggcactgcaggcgttcaccaccatgcccagctaatttttgtatttttagtagagacagt[151 bp omitted]tgctgggagtacaggcgtgagccaccg[140 bp omitted]taatggacgcagacaggatgtgggacagaagcaccggcgggaagcaagcacagggaagctcccacctccctcccacaccaccagccaggccaggacgagggcctgccaccgctggagcctgggctgtccctcccaagtttcgcagtcatccagtctccattaggcgcctaccccccagagccaagccaggacagctgagtcagttcagggttcacatcctggctctgcacatgtggccttggcggcggggccggggggggggtctctccagacataatcttgggcctcacctatgtccctggaaagtgggagcacctggtggggttctggggagggggaattacgagagctccaggaaggagcctgctcagcaaggacagggcccatgagcggtgcaagagatgtttcagcaacgccgtctgggcgtgtcctgggacccgagaggtggagaccgccctcagcctgtctcagaatctgagcctttgccttttctcccggcagcagggagcggactctcctctcccgggccgccgtgggggtcgcgctcaccctccagcagctccacgtggccccagtccttcctgcggtcttggtcttgctcctgggggctggcggacgagctcctcctggggccgcagacgccaccggcggtccctgcgggaaagacgagagcggctgagcggggccgggcgtgtgggcgggggcctccataaaggcagaagccgaagggtcgaagggcaaaggagccctaaacgcagcggaaactctcggagcacgggcttaagttggaaagaaactaagacagcgaaggtggaagggccccgccgcggcgaacacgggcgcggaaccgccgagagagggttcctcgcactcgaggtgcagcaggtcaaaggttaagagccctaaacaccacacctggggtcaggaggctgcataagaaaccacgagtcaaaggtcagactgcacggaggagcctcagtcgaaaagcgggcaagggcgagtggaaagcggggccgggtcggtgggctgcgcacgcccaggtgcaaagaggcaaaggtcaaagcgccaaaggccccggccgcgcggggaggagcccacgccgtggcccccgggctgcctggccgtctccctttgtgttaccttctttgccggggagtcccgggcggccgcaaggccgtagggctcgtttgagccccgccgctccgcggccccagcaaagtgccgacattacgcacgccgctccaggccaccccaccggcccgcgcctgcgcatgcgcccgcgccgcctgccgggagttgtggtttcatggtcgacggaggctgcgaagggaaaccccagccggaagtagactcccaggatgcagcggaggcgcgaaggcatgcgccggtggacgctctgattggttcctcctgctgtttttaaagggagggggcgggacagagctgttgccgtggcaactgggaggcactctcaggctgttttcccgaggacctcaaatccggactttttttctgtttttctttcttttttggttttgttttggacgcgttgtggcccaggctggagtgcagtggcgtgatcatagctcagtgcagcttcgaactgctggggtaaagagatcctcgcccctcggcttcccaaagcgctgggattgcagacgccgccaccgtgcccggctttttttttttttttttcaaggcatactcatctaataacgaggacagcatctgcaatttagagattcctgtccgcaaccttcattgctccaacgacaacttttgggtaagagtcattaggatgccgtctatcatggaggaagctgaggctcagagagggccaccaagttgctggaagacacagcacgtgcgacctcagggaggctgcaaggagagaaagccccagtccgcgagactcccagcctccagcttcagtttaccctccaatccccaagccctcaggggcaggagccgaatggagcggcaggcttggattcacctgctaagtggggtgaggtcaagggaatgaaataaacctcggagcctagagcctgccctggtctccgcgtgatcctgcctaggaggagcagggcgggagctttagaatggaacctggaaggtgtgcccacctgtgtcgttcagccggggcagcaggccagaggcgggagcgcctgctgtggggcagtaggcttgggaagggtgagaataggaatatctgggggtaactgtgttccaggctaatatcccagttgcaaaggggagctggtttggtggctcaggcctgtcatcccagcactttgggaggctgaggcgggcggatcacctaaggtcagagttcgagaccagcttggcaaatacgcaagcatgcctggcaacatggcaaaaccccgtctctagtaaaaatacaaaaattatccgggggtggtggcgggcacctgtaatcccagctactcgggaggctgaggcaggagaatcgcttgaacccgggaggcggaggttgcagtgagccaagatctcgccactgcactccagcctgggtgacagagcgagaacctgtctcaaaaaaaaaaaagtgcaaagggaggtcagttcagtgcctcaggcctgtaatcccagcactttgggaggctgcggcgggaggatcgcttgagcccaggagttccagacaagccttgggcaaccgagatactgagacccagtctccaccaaaggaaaaaaagaaattagccaggcatggtggtgcacacctgtggtcccagatactcgggaggctgaggcaggaggactgcttgagcccaggaggtttagactgcagtgagctgagatggcgccactgtactccagcctgggttgacagaacaggaccctgtctcaaaacaaaacaagtgcaaaggccctgaggcaggaacaagcgtggacagaggagcaatttgagcagagtggggctggggagagggagcaaagatgtagctggggctcagttagggggcctgaccacacgggggctcgggggcctcagctcaagctatcctccatccccaaaccctggcacttcagtttccccatcagcccagaacgaggactcgacctcactctggaagggcctggcagcctccttacagcacattccagacgctgctgccgacgcctgcgtgagcgcactgatgccaccggctgggaatgttttcgacagacggcagcaccctccctcacctgcctcagtccacctcagggtgccccagcgggctgtgacctcagacctcacccactactggggtcacctgcctggccctgaatcagccaggcctggtgtgccaagacctacagacaccccctgcacccctgcaggctggcagagccagaaacttgggtggaaaccgacttctgaactatttcaccattccttatgcgttagtcttttcttttatttgatgagatcccagcactttgggaggccgaggcgggcggatcacgtgaggtcaggagtttgagaccagcctggccaacatggtgaaaccccgtctctactaaaaatacgaaaattagccgggcatggtggcctgtgcctgtaatcccagctactcaggaggccaagggaggaaaatcacttgaacctgagaggtggaggttacagtgagccaagatcgcaccactgcactccagccttgggcaatgtagccaaaccccatcactacaaataatacaaaaaaattttgttggctgtgatggtgcctgcctgtggccccatctacttgggaggctgaggtgggaaga[135 bp omitted]gtttctgaaacagctcattgcccaaattccagcctcgcaactctgtagccgccaccaccccccagccccaccatttattttaactacatctgtctccaccactcctgtattaagtaaatgcaatattggctggtcatggtggctcatgcctgtaattccagcactttgggaggctgaggcaggcagatcccctgaggtcaggagttcgagactggcctggccaacgtggtgaaaccctgtctccactaaaaattcaaaaattagccggacgtggtagtgggtggtgcctgtaatcccagctacttgggaggctgaggtaagagaaatgcttgaatccaagagactgaggttgcagtgagctgagatctcgccgctgcactccagcctgaacgacagagcgagactccgtctcaaaaataaattaataaatacaacattaattatttttcttgcttaagttttacgaagagacttaatatcaccatcaaaagtgggaaaccatatatctggccgggcgtggtggctcccgcctgtcatcccagcactacgggaggccgaggcgggcggatcccctgaggccgggagctggagaccagcctggctaacatggtgaaaccctcatctccaataaaaataacaaaaattagccgggcatggtgggtgcctgtaatcccagctattcaggaggctgaggcagaagaatcacttgaacccgggaggcggaggttgcagggagccgagatcacaccactgccctccggcctgggcgacagagcgagactctgtctaaaaacaaaacaaaacaaaacccaaccaagcaaaccccacagagtcgagaatcgctagatggaaggggatggcccaggtccctggagcccctgtgacaaattaccacaaactcggtgccttaaagcaacgttcattttcttacatttctggaaatgaaaagtccaaaatcaggactgcggggctgaagtcaaggtgtgtggaggcctcgctccctccagaggccctggggctccttcctgcctctcccagcttttgaaggctccaggtgtgcttggcctgcggccacatcactcccgtctcggtctctgtggtcgcactgcagcctcctcgtctgcctgtgtgaaatctcctcctgtctccgtattgtgaccgcgtttaggatgccccaggacaatcttctccatatcgttcagatcttcatggtgtcaatatattgagactctttttccaaataaggcaaatgtcacattctagggatcagggtggggacttacctttgggccaaccacagaggctacaaagaggaagacaccactcaatac[137 bp omitted]agattctcctgcctcagcctcctgagtagctgggattacaggcgtgaaaaggagcaaggctctgccccagccacagcgcggatgcaccttgaggatgtcatgctcagtgaaagacgccagacacagaaggacacacagtgtgtgatcccctttatatgaaatgtccacaacaggcccatccacagaggcaggaaggggatgtgtgggtgccgggggctggcagaggggatgagtgacagctgatggggcttcttcttgcggtgatggaatcttctggaactagacagtcgtggtggttgcacaactctacgaggtactaaaatcactgaactggctgggtgcagtggctcatgcctgtaatcccagcactttgggaggcagaagcaggtagatcacgaggtcaggagtttgagaccagcctggccaacatggtaaaactctgtctctactaaaaatacaaaaattagctgggtgtggtggcaggtgcctgtaatcccagctactcaggaggctgaggcaggagaatcgcttgaaccagggaggcagagtttgcagtgagccgagatcgcaccactgcactccagtctgggtgacagagccagactccgtctcaaagaaataataataaaataaaatcactgaactgtacagtgtaagtgggtgaattgtgtggtatatgagtgatgtttccgaggtgtcattaaagaaactcagacgcctggggtggggccagtctcaccgctgtgggtcccatccccatcatttctcacaaggccctcagatcacccttccgcggtggggggcggacactctaagaagggaagacctgggctcctgctggcgagaaggcggtggacatttcttcagtgtctggtgccgcgccctctgcccagcgtgctccgtggagggtctcattgtcttcctccagacgtctctttactggcccattttacagaggcggaaccgaagcttggggtgttggccacagggctctagtgtgggaagccaggccaggctggacctcagccatggggacccctgtccctgagactgtggcacctgccacaccctctgtgtgacccgcctaagccaggaagagagggtcaggagatgcctgagccaccaagaaggcatcccagcgtccagccagaccggttatccctccagagggctccccggcaggacaggctggtcgccatgtcttcagcctggtgctatttaaaggtgggtgccacctggggctgtggccgcagggccaggactgggctgctgggagctgtgtccccacagcggaggtcgccgcccctctcaggcctcggtttccccagttgtcaatgcctccacttggctgtgagtctgtgagggtcactgtgctcaccttttggggcccagcgcatggggcaggcagaggaagggtgggggccagccgccttgctgggtggttccccgtggggcctggggtatggctctaagggaggagcaagtgtgggtgcgaatggggccgccccattcctgccgcctccgacgtgccccgccagccggccaccgacaggtctacgtggctatcctccctcctgcccacctacctgcccaaacacacgtccccagtcgtcacctgcccacccacccgcgcattcccacacccttgtgggcctggctttcgggaaactacaatttgcggggagagaagtcccacgagggcatgccccggagcctggctggtcccacggctgacgcacgcggcaggacctcccgtgtccatctctgtccccaagcatctccgcctctgcccctctctgtctctgtgtctctctcgtctctcccggtcatcttccttgtgtctcttgactgccgccgtctttctgtctctgtctccctccgggtctctgtctccctccaggtctctgcggcccgcgtctcacactcccgcccccgcaacccgaggtcctagcccgcccggggactcggctgactcacggacacgccccgcgagacaaacaacaaacgcgcggaggccgagcgcggagtcccgcacggccgcgcccctgtgcacctggcccccgcccccgagacgtcccattggccggcgccctagcctggtcccgcccaagtggaccccgcccccgccccgaggcaccccattggccggcgtccccgccccagcgaacccggccccgcccccgaggcgccccattggccccgccgcgcgaaggcagagccgcggacgcccgggagcgacgagcgcgcagcgaaccgggtgccgggtcatgcgccgccgcctgtggctgggcctggcctggctgctgctggcgcgggcgccggacgccgcgggaaccccgagcgcgtcgcggggaccgcgcagctacccgcacctggagggcgacgtgcgctggcggcgcctcttctcctccactcacttcttcctgcgcgtggatcccggcggccgcgtgcagggcacccgctggcgccacggccaggacagtgagtgcggggcggcgggggcctggggtggggaggcggcgggtgacggcaacgcggccgccgtcttcacggtgacctgcgcccgcgggggagtcccggaggctcctctgtgcagcctcggcctcagtttccgtggtctgtgagatgggtgcagcctgcctggtgggagggttgcactgttaaagcgaaggctgcagcggcggacccggctcaggggcagagaagcgtccgtgtggtacaaccctgtgggtggggccacccatctgcaggtgggaaactgaggctccagaggggctggggcaggcccagctgcatggcggaagcggcggggggctgacctccggactcctgacatcacagaatccagtcagggctgcctgagtcggggccccctctgcttcttcccagacaccccatctggcaggtgaggacaaggaggcacacagaagggatgggacctgcccagggtcacactgacaggggtggcggagctgggtccccacagggcccaggacgtcacggagcgggcgtctctgtccccagggtctgccgagcacactgaggtaggccctcagtgtttgtggaatgtcaggagcaagaggagaggctgggcacagcaggggatgtgggtacctggaggccaggggagtcggtgtccccgccgggcggggggcactgggaagggggcccgggcccgctggctgccgcctgaatcaccaccatcagggcaggtaatcaccccctgtccttcccaccgctttcatctgggcgccaaggccctcattaggccgcacgtgacgagggcggacaggggactggctgggccggtccatccatggcgggcatggccaggcggggtggcctcgggccggggcagaggcctggctccgctgcctgacctggaacagtctctgcctctctccaagcctcggtttccccagctggacggtgatgggggtgagggctagctgagggctctcctgcccttcgtgcattcgctggtcactaatcgggcaccttgtgggtgctgtgctccgcatgggggacccagtggtgacagagacgcccaccctcctggggctcccagagcagaggcgcgcagcagttagacacgtgaacaagggcgcag[132 bp omitted]cccgtctctaccaaaaatacaaaaattagccgggtgtggtggcgggcgcctgtagtcccagctactcgggaggctgaggcaggagaatgacgtgaagccgggaggtggagcttgcagtgagctgagatcgcgccactgccctccaccctgggcgacagagcgagactccgtctcaaaaaaaaaaaaaaaaaaagaacagtgaatgacgtgaacaagggtgcaggtgggtgcgcagaacagtgaacggcggtgttgggaggcaccttgccaggggaggggaggtgcagggcgaggaaggggccaggggagatcgtgacacagacgccccagaacaaccacctcaaagacgttcctgtgtgtcctggaaggtcgggctgggaggctgccccgaggagctttcactttgacagggagctggccgggcacgcagggaactgtacacccagctgacaaagcggcagacacccaggccggggtgagcgagtgtgggtgaggagtggcggctggccccagggtccttgctggacaagacacttcagctcagggtggggcagggctcacccagggctacccacagacgatggcgtccaaatctggctctgccactcccaggcctcaactggcccctctgcaacgtgggctgctgagcgggcttggtaggacagctggcatacagtcggcgctcaagcatgtctgtggtgtcccataaaccaccggtgtcccactctaggccactgccagcccggcctccagtccagagtcccagtccggagtcccagtgactgtgcgtgggccgggcagctgagctgtgagggccgggctgggggctccatatggggtggtgtgagctgtgagggccgggctgggggctccatatggggtggtgtgagctgtgagggccgggctgggggctccatatggggtggtgtgagctgtgagggccgggctgggggctccatatggggtggtgtgagctgtgagggccgggctggggggtccctggggtggtgtgagctgtgagggccgggctggggggtctctggggtggtgtgagctgtgagggccgggctgggggctccatatggggtggtgtgagctgtgagggccgggctgggggctccatatggggtggtgtgagctgtgagggccgggctggggggtccctggggtggtgtgagctgtgagggccgggctgggggctccctggggtggtgtgagctctgagggccgggctggggggtctctggggtggtgtgagctgtgagggccgggctgggggctccatatggggtggtgtgagctctgagggccgggctgggggctccctggggtgctgctggtcgctggctcattgacagttatcagtggtctgggtgggccctgccccttctgactcccacatcccaggaaccctttcccaaccttcctcgtggtgttgctgcccccctgacgtccgtccctctgggtgtgtgggagcccccccgccatacacacacacagatgctgctcttgggctgagctgcagggacagcgctgacctggccctcccacggggtcctcatcgatctctgcactcccccagctcgtgggggccgtcctgcttcccgttccctctgcctgctccttgctcctccctcacatgctggggggggctcctggtgtcagtcacggctctgggggatcctgagtgtccgtcgtggtcgggaggggactcgtggtcccgggggtctcctggtatctgtcgtggtcctgagggccctgcacgaagcacagcggacagcagcggtgctgggggtgagccagcaaggccctccccgacccccgcctcccccaggcatcctggagatccgctctgtacacgtgggcgtcgtggtcatcaaagcagtgtcctcaggcttctacgtggccatgaaccgccggggccgcctctacgggtcggtgagtgccgggcagggctgggcggcgcgggcagggtggggagggtgggccggcctcacccccgcccgcagcgactctacaccgtggactgcaggttccgggagcgcatcgaagagaacggccacaacacctacgcctcacagcgctggcgccgccgcggccagcccatgttcctggcgctggacaggaggggggggccccggccaggcggccggacgcggcggtaccacctgtccgcccacttcctgcccgtcctggtctcctgaggccctgagaggccggcggctccccaaggtgcctgggctggtggcgaggggcccggccacgcttgttcttccccctgcgggctctgtaagcgctgagtgcccaccgtgtgcgggcgctgtggacacagcccaggagccctccaggggggtcccagcctgagggggtggtggccaccaagcaggttcaatcctgagttggggacctcgaggacccaacagggcgcctctcgggctgaaggacgcagacgtcgaaaggtcgagggggacgtcccaggcagggcccggcagaggcaggggctcggggtggggagcacgttgggagtgggggcaggagcggaggggaggggagggggccggggagacggtgacagacgccgcagaacaccagcctcgaagccggtcccgtcccgggaatctgcaaatacaacgccttgcgaggacaaaggcacctgcaggtgggacggagatggaggagcatccagggtggggggtccagggccccagtgtcctcacagggtcctcacgacaggaggcgggacagtgagagccagagagagatggggatgggccgcgctgtggccgtgaaggggaggaagggccctaagctgagggacgtgggtgcctccagatgctggggaaggcgggaacggttccgcactggagcccccgggagggaccggcctgctcctgccttgatatgagcccagtgggacccagtttggactctggcctccagaaccgccagaaaataaacgtagtaagccatcaactttgtggtcttttgttacagcagacgtcggaaatatgcacacggtgtctgaaactgttctcatgacaaaataagcctcagatcccccggggaagggcggaggccaacgcctcggtgttcctccgatcccccgggaagggcggaggccgacgcctcggtgttcctcggatcccccgggaagggcagaggccgacgcctcggtgctcctcagatcccccgggaagggcagaggctgagggcaggagccgtgctgggtgcagggcaggcctgggggcttcatgccgctgtcctgcgggacgcagagagggctggccgtcggtgtgggggcgcccccacctgtgcccagcgccctcctgacatcctgactccgctgggacttctgcctacagccctgggagtcaaactccagcctctcagagaaaaggtcagagccaagagccccacagcctggagccaggcagtgacaccctgggcctgtctccccttctgtgtgtggggcgacagcagcatcgccctggtgaagtccccggggacggccagggctccatccccagccgccgccttccacataaatacaggaagactgggccgaggcacttgctgggaggtgctgagcagcctgacacggaaaacccttctgggaagggagggtcgtgcccggcccgagagcttctgctcaccctgcagacagaagcgagccccaccccaggggacaccaggcggcctctggggacatctttggctggcatggagtgggtggaggacagggctgcacccaggatgtccccaggttggcagtgtgaggggagatcggcccacgttggccagtcggagggcgtcgccacttgagttgtcactgggagctgcacaggtcaccacagctgaaataaaacttgctggcaccccacgcaggaacgtaacatg[151 bp omitted]aaaattagccgggcgtggtggcgggcgcctgtaattccagctacttgagagg[144 bp omitted]tttctaaaacagagcgtggaatgggcgtacagctccgcacatcccagggcagtgaaatcccggttcacacagagccctcagcagcttattcgcaagcccaaacctggggacccccgttgtcctcaggcagtgaggtgggggccccccaacagagaggagcggcctgggggcacagaaccagcggctccccaggaaatcgccagcagtgaaaataagacaaccccaaactgttgcaaactgtgcttccgcttacgaagcactcctgagcggcagggcggatggggagagggcggctgcaggcgcgaggggcccggggacgcaggggtgcgggccttaccagggccctgtcctgtcgtgcagcaggctcctggggcagggaagacaccaggggcggccacttcttactgctgtctgacctcgagcaatgcggcctcacagcccccaccagggtgccggtgtcctctgggcccagcgcccccgaggctcatgcctgggtggggcgaaccaatcggtcctgctcctctggccactccacgcgagggaagtcccagcctcacaggcaggcgcacaccccggcagcatctctgacaaaggccctccagttccgagtctccaggtcccgccgctgcaagcctcacctgcccagccctcctctccagctccaactccaactcccaagaaccaccacggacacacagaacccgagccttgtctccctcaacgcctcctgactcaaaactccatcttccaacaggaaaacggctcggccgggggactgtgacccggagcaggcggcccagcctgtcgcgcagactcggggcctaaaacacttgttctctcagtccggagatcaaggacgatccgaggtaacctccctacctcggtgtcctccatgcaacctcgtcttagggcaccgggtacgttacctcgtgaggagccgagtccgcgggtcctggggttgagatgtggacgccctcagggctggcactctgccctggcggccacagtcatggaagtcccaacgcttctctcggctccgcaaccccagagggcggccacgaggagggcccgccacgcacgaccccagagggcggccaccaggagggcccgccacgcgcgaccccagagggcggccaccaggagggcccgccacggcgttgcggcagcagcccagaaggtgccctgcgcacggtccggacaggtgggatccgagttacctggccaagggggctgacgcagacacgtcgcgggacacagtgaagagtgtggtgcagagcggagggcgggagtctttggagaacaggtaggggcgtggggcacgcgcctcccacgcgcaggagccgtctaccgtggagggacacgggtggtcctgctggaggctcctctccgttagctgtctccatcgtctgattcttggatcccaggatggtgggatcatcagcaactgagatgaacccactgccccggccccctgagcccgcaggtccccacgccttgccagctgtgcccgagctggctgcaccccgggccaggcatccagcaaccttgagcagtggggtccggcttttcagaaggggccaggaacccgcgtggctgaggtgtgaccgaagcgtggggcagaggcgctgggccctggcgctttaacgctggtgtttctggttttaaatttcacgacccagtgacactgccaccctgctacctcgccagcagccctcctgggcttaacttcgggagagcagttttgctagccggccctgggtgccaagccctgcaggaggcgcagacccctggagacaggaccggactctgcagagcccgaccagcctcccagcttggccttttcctgacgcacgggcgcagaaggaaagccacagcaccggcttctctttgtaagtagtgtattttaaatagctttcaagatacacatattttttcctttaaaaaagtctgttggagcagttttgttcttgaattttgctggtcatcctcatggtcccgagcccccctactccgggtcgtggaggcggccgagggggaggctgggggcccacgtggcccgtcctggcggcacctgcagcactgggggagccgctgaaccccgtgcttcagcgctgggggagccgctgggccccgtcttccgccacaaaccatgcatggccgccacgtgagctcaaacgtccgtttatttcaaagcagtaataatttaaaattataaaaatctttccaccgctgaacgtttagagggtgaggttagacagaggacggggaggctggggacgccccagaggggaccatgtggcccacgccttcccaagccagggggccggtgggccgggcccgggtcctgccctggaacaggcgggacctgcagcgctgaccagccaagcgtggcgccgccggggcacccagtctgtgggtgccgtgtggcgctggctgagggtgggtgggaaaggccccgtgctttcccgacggccgacgtgggctcacgagttgcttgtggcgttctcgttgctgggcgagctggaggaggacgatgacgacgaggaggagaagctcaccccagtgaggccaggggggttcgtggccgtgttctgtcccgtgaggctttttcggcagacggggcagctgtcgtgctttgtggggacagaggcagggacgggagaaggggcaggttagaggcgggagggccgcggtcggggtgggggggcgggtgggcggggcactcacctgctccagccagggcacgatgcagccgtcgtggaacaggtggttgcagggcagctgccgcacacgctcacccagcgcgtagtcgtccttgcacacagggcactcgagcccggagcctgcgggagtgtgcagctgcggtcacagcgggcgtggggggcctgccgagccttcaagggcaggctactccacagcctcagccggaggccgcccctgagcccagcgaggggagaaaagccgtgtgtgtgtcccccgggctgccagaggggacctggacagaaccctctcctcccagcccaccttcagggaaatgctcgaggccgggtgcggtggctcacgcctgtcatcccagcactttgggaggccgaggcaggaggatcacctgaggtcaggagttcgagacctgcctgaccaacatggtgaaaccctgtctctactgaaaatacaagtatgagccaggcgtggcggcgggtgcctgtaattcccactactcgggaggctgagctctcatacctacgtgctcctcagtgacggggacggtggggagggcctggattttctctttatctgccggtggggggcctgtgttttcaaactgattgaggagctgaaagacaagaggcgagagtgccgggagctcctcgggggcccggcccggggctctgaaacgcgaggctgcaggacctgcaaaagcaccgaggccgcgtttgtcctgggccctgggccccttggagcccgcccggggtcggagatcactgtggagcccacgcggcccccccgctcctgggtcccctgacggtggaatgggggaatgggcggaggcccgcgctcctgggtccctgacagcggaatgggggggggggccgcgctcctgagtgccctgacggcggaatgggggggccgtgctccggctggtgggctactgtgagggtcgggtcctgccagtgacaaaatgctccaagggctcctcagcaaggctgagacgggtggcacttggaagcaggtcagggcgcgacctctcgggaagagggaccgcgtggcctcctgaccatgtgactgtgggcgagtcctccccgcggttttgctacaacgttccgcgtgaacacaggagaacccccaaagttgccaagactcagaaatggcaggaggaaggccggagctgccccctgtgcccgccagagcgtggaggctgtgcccgcatcccctttgacctttgtggggcttcgtgggtccaggcagtggggcagctcccaggggtgggcagcccagccctcccccagcaggcactctgggccgtggccacgctgtacctgtgtgatgatggcatccaggccgttggccccccaggcgtagtccatagggtttgagtgcaggactcccctggaggtggaaggtggggttcaagtggctgacgggcagctggggcaggtgcgtctatccaccccactcaccaggggcccaggctggggatggggacaggcaccccctcctactcaccagggaccctggctggggatggggacaggcacccccacccactcaccaggggcccaggctggggatgggaacaggcaccccctcctactcaccagggaccctggctggggatggggacaggcacccccacccactcaccaggggcccaggctggggatggggacaggcacccccacccactcaccaggggcccaggctggggatggggacaggcaccccctcctactcaccaggggcccaggctggggatggggacaggcaccccctcctactcaccagggaccctggctggggatggggacaggcacccccacccactcaccagggacccaggctggggatggggacaggcacccccacccactcaccaggggcccaggctggggatggtggcgggcgtgatgatgccgttgacgagctgctggatgatcctggaaaagagagcgccagtcacggggtgaggccgccccacgcacaggagaggcgccaggcctgccaggtccgtggtgagcaccaagggcagggccagcatcagcttctagattagcttctatttatttattttactatgagccagggtctcactctaatgccgaggcaggagagaagcagcttgatcttggttcactgcagccccaacctgctgggcttaagcgatcctcccgcctc[135 bp omitted]gcaacctctgcctcccgggttcaagtgattctcctgcctcagcctcctgagtagctgggattacaggcgcccaccgccatgcctggctaatttttgtattcttagtagagacggagtttcatcatattggtcaggctggtctcaaactcctgacctcagtgatctgcccgcctcggcctcccaaagtgctaggattacaggtgtgagccacctcacccagcctcagctactttttaaaaattagagatggggcctccctacattgctcaggctggtcttaaactcctgtcctcaagagatcctccctctttgacctcccagagaactgcaaatacagcactgagccaccgtgcctggcaaaattagccacttttaaagatgacatttccagcaggtgagacacacaaccataaaagcatcaaccgccaggagtagggccctgcgacggctcccccaggctctgttccaccaggagcagggcccagcgacggctcccccaggctctgttccaccaggaatggggccctgcgacggctcccccaggctccgttccaccaggagtggggccctgcgacggctcccccaggctccgttccaccaggagtggggccctgcgacggctcccccaggctctgttctgggcccaaggcctggacagcgtttgacgacacgcgtgtggacagcagtctccagagcacgtgggcctggcaggcacacggtgccccactctgtggtcaacccacacaccctgaaccggcatacttctgtctccgaagggccgtgtggggagtcacagggggctggagggcctggccgggcggcctctccagagagcctatggatgatgccacgtttccgtggaacccgtgctggattctaagcgccagaacttccgacctcaaggcgtggggccctcgcggccacccccggggccccctcacccttccagcgtggggacgccttcgtgccggccggtggcccgccgcgtggtgaggcgggcgcggggctgtcgggcgccgtaccggtgccgggacggatggtctctctcccgccggctctcagggtccctgccgtcgtcagcctgcgccccaggagggaacgtggggatctcgaagctgtcatcgaagatgccgaaagcaaactgtccgtagccctgcggcagcgtgaacaggtgctggtccacgtgctggggagaggaggggggcgtgacctcgggggctcaggcccgtgcagtctgctgggggcgctagggcacaaagacaaaggagaaagcaagacgggccctgctgggtgccgggtgggagggagacgcagacagggaggcaggaattgggcagagcctgccccgctggtgtgagatgcctcggtggaagtttcgctttcatccaagaaaccaaccaagcagcgtgggccgccccaatccctggcccgggcccctggagggaaaaatttcctccgccgtgcgggcagggagagccggggaggcgaggtggggacaggctggcgctcggggccccgagcaaggctgacacgatcgggaagcacgaggggcgggcgactcacctccaacggtggccggctctggtctgtgggagctgtggagggggcagaaccattttctgtgctcctggggagagagtgcaggtcagcagtgccggctaccctgtgcccccatgcgccaggcgctccctcccctcaaaagcctatgttgggagagcaggaattgtccttggcactgcttcccacccgccaccgccccagcatttggtgccgtaacccgctgctgcttccctcgccagtaaaccacgggtttctcgataaaccggtgcagaccccaacagcctcctaagcgtgagaatgtgggtagggcccccgtggccccttccccggagggcctgggtcaccagattagccgccgaggctgagggaggtgagcggctgcacaggttgccggcactcccctctggccccggcccggccatcacagaagagaacggcacgctgctgtctgcacagagaaaagtgctcccggagccacagacaccagggcctgacggccccacactcggcggggcggacgccagcacagcccacacccctacaacagctgaggcccggctggctcttccagcctcttcaacagggggctgcattacctggtctcttccggaagctcctcgataaaaccagactcgcatcttggacagatataatcctgcaggagagaacaggaggccgggtcacggtgacgccggcatcacctgcaaacccccccaagtgtgaggacagaggggctccggacccagcggtctctggctggccaggcacacgcaggccagggtggctcccaacccgtgggtcctggagggcggccgaggggacctggcctctgccagccacccgctgaccctttggtggctcccggcgatctgagcccctccgacctggccccaccgtgacgggcgtcaccagcgtcatcagcgccttggctgagcccctccgacctgccccaccgtgacgggcgtcaccagtgcctgggcacctcctcacacaggtggcaccactcggaggggtgccccaataccccacagtggcatttccaggacgctctggcagccccgcacacagcccgttcccctggctcgggggaggccacgtccacgctggccacacccctgcaagaccccatccccaggtccccctagagccaaggacaacacaaggccaacatggtgatgtcccagaggagacgtgaggaccctgcccagggacagccgtgggtgagtcccaaaaccacgttcacagttccccagcaccagcctcaagccacagctgtgccgagcaggacggatgccatcccctgtggatctcacactgcaacgggatccccagggctgaagggcctgctggagacactggctcacagggcggactcctcatggatggctgggcccctggtgatggcggagcgtgccgagcattcgtggggcctgggctgaaacgtgcatggtgcctcccggcctcaccaggggctgggcagatgccgacacacacttcccgcacagcctgcagaactggaaactggaagctaaatcaactgctctctatgaacgacccagtctcaagtgctccatcgcagcaacgtgaaaatggcctcacacggcacgtgtcatcacgccaggggctcacatgggggtcccaagaccacccccaggtaacacagacaaaaacaggagacaaggctcccaccgtgcatgggggagtgctgtgaggggagccaaggtcgaccccaggctctggggatgcaggttgcaccggggctgttcagtcttcgcaggggcaggggctgggacctctccagcaagcaagatcccggcctcacccactgactctggggagaagcgggggtctggcgtgcagtgcccaaggggagggccgacagctgggcccccgcccacaccacgccgtgcctgcctcacctgctcctgccactgaagcacaggctgggtggggagggactaaggccagggtgagcaaacgatgccagatgcacatgaacccaccgtgaggggagagtgaagaggcaccatctacaatatagaaaaagtgcggcccggctcctggtgaggccgggaggcaccacatgcgtttcagcccacgccccacgaattctcggcacgctccgccatcaccgggggcgcggtggctcaggcctgtaatcctggcacttcgggaggccgaggcgggcggatcatctgagatcaggagttggagaccagcctggccaacatggtgaaactctgtctctactaaaaatacaaaaattagccgggtgtggtggcgggcgcctgtaatcccagctacttgggaggctgaggcaggagaattgcttgagcccgggaggcggaggttgcagtgagctgagattgtgccattgcactgcagcctgggcgagggagcaagactccgtctcaaaaaaaaaaaaaaaaaaaaaaaaaaaaaaaaaaaaagtgctggccgggcgcggtgtctcatacctgtaatcctggcactttgggaggccgaggcaggcgaatcacctgaggccaggagttcgagaccagcctggacaacatggagaaaccccgtctctactaaaaatacaaatgttagccaggcgtggtggcacgtacctgtaatcccagctactcaggaggctgagacaggagaatcgcttgaacctaggaggcggaggctgcaacgagccgagatcatgacattgtaactccagcctgggcgacagagtgagactccgtatcgggaaaaaaaaaagtgcttacaactcaaaagaaagaaagaaagaaagaaaaaaaagcccaggccaggtgcagcagctcacacctgtgatcccagtactttgggaagccaaggtgggcagaccatttgaggtcaggagcttgagaccagcctagccaacatggccaaaccccatttctacaaaaaacaaattagctgggtatgctggggtgggtctgtagctccagctactaaggagggggaggagacaggcaggagcgggaggcaggaggcagaatggcttgagtccaggagatcgagaccgcagtgagctgtggtcccaccactgcgctagcctgggtgacagaaccagaccctgccaaaaaaaaaaagaaaaagagaaacagacaacgcaactaaaaacgggcaaagtcgggaggctgaggcaggagaacggcttgaacctgggaggcagagcttgcagtgagccgagatcgcgccactgcactctagcccgggcgacagagtgacactccatctcaaaaaaaaagaaaagtggggggggaaaggacgtgtacaggacatgcctccaaaaacacgctgggtaaacgcagccggccagccccagcgagatgccacttcccagggccagccaggacgagatgcaagaccccgtcaggcctgctgggagcccagaagtcccccagatggaactaccccatgacccacgagctagaactttcactccaggcgcagaccccagagaaacgaagacacctgcccaccaaatgttcacatggccagaactggcaggtgagagttcacggcagcacagttcatcatcgtcgtcggcagatgcaaacagctccagtgtccacccgcacctcagagcacgactcaaccatggaaaggggcaaggcccagaccaggccacggcgggggggaggggggattgcatcttgaggacatcacgtccagtgagagatgccagacacagaagaccacgcagcgtgtgatcccacgtctatgaaatgtccaggacaggccgagccacagagacagagaggggatgtgtgagcaccagggcctgggggaggggacggggagtgacggctggcagggctgaggtgggttctttttgcagctgtgagaatgctgtggaattagactgtggtggtggttgcacaactttatgaatatactacaaacgtttcaccaggtgaattatatggtgtgtgaaaatactgagataaagctattaaaataaatgggccaggcgcctgtggtcccagctgctagggaggctgaggtgccaggatcgcttgaacctgggaggtggaggctgcagtgagccaagattgcagcaacagagtgaggcagcatctcaaaaacaaaaacaaaaaaaagaaagaaacaaagaaaaaaagggctgggcacagtggctcacacctgtaatcctagcactttgggaggccaaagtgggcagatcacttgaggttaggagttcgagaccagccaacatagggaaataccgtctctactaaaaatacaaaaattagctgggcacggtggtgggtgcctgtaatcccagctactcaggagctgaggcacgagaatcgcttaaacccggcaggcagaggttgcagtgagccgagatcataccactgcactccagcctgggccacagagtgagaccgtgtcagaaaaagaaaaagaaaaagggaaaggggaaggggaagcagccaacgaccaccactgtggccctgagcttagtgtgggagcagtgtggctctgccacagtggccgtgacaactctccccaggcgtcggttcttggggtgtgtttggggtgtcgggattgggacgccccacgtaaacacgctgagacttcacagtcaaatctgaacccctggtttctgccggtgtcgggtctatcggggctcctctgggctcaggggttgccgccgtccgcccgccagctgaccgggagcccagggccgctccatcgcctgggtgggtctctgggaatggaggggtagctcagggctcaggctctccctgcatggtgactccccaggctagcaccacccagtggacctggaacagctgcactggcccccactgagggcaggacgtaagtcagctgtgcagctgccccgaccaccatctctcctgctgggtgcatccacaaggtcaggcagccccagaagggcctgagggagaagctgtctccctctgaggaccctggcttgccagccccagccccgaatctctcctggacaagcacgaggccctgcacacgcccacgtggcctggcacagcgctcggccgctctggtccccatgtgccgagctcagcccctctgtgcatcactggctttctgtcgggctcccgggttcccgtctcagtccagggcacaacgcatgctcccgccacccgcactgccggctcacgacagcccgacctggccacatacacactcatctgccccagccctggcctcctcttggcccccgctgtcctgcccgcagcggccgtggggcctggtgccacagcactgtccagaaccctctctctgcagcacccactccagcgtcggggcctgtgcacgtcggccctgctgctggaacgcccaccctaggggtttcaaaggtcacctctctgctccaagcctctgccctgtcacagaggacagcctggacactcactcatatctgaaatccgggtgccatcgaggacgccaagggctgcgacccaactcctgcgtattgtcagggctctgggctgtctctcaggcccccggccagcccctccagggccaccgaaggccggaaccgaggctctggtcacgaaggcaagtgacaggtggatcccggatatccagggtggaggttgagcctctgctggccgacggtgggaggggctggacctgggggtctccagccgccctcctcctccaagggcacagccaagagaccgcttggtctcgtattaaatcggggcagctgcaggtagaaacgcctgggcaagggggcctggtgaaggagctgccccaccttctccgggggcagcacgcactgggggcccccacagaggccccattggagcctctggccctagcagaagacggtgaatccattcacctctccgtcagagaacagatgcaggaggtacgatcacccggcatcatcaccatagcaacagctggccaggcagccagggtaggggggaccctgccagtgccgggctccacccatgcacccctgcagcgtgatggcctcatccccgggtgggacctggcagggcagcagaggccccttcatccacggggcctgcacggggcgcatgtcctgagggcccagggccaggcgcatggaggggagtgggctggcgacctacaggccccagatgactgacagtgaccagggcaggcaggcccctggtgacagtgactcggcccctgtgggtggcagggccctcgggaagctgtgcacatcaggagaccccagggagagtcatggtgcagtgctcggcctcggtaggagcccccgtgctggctactgttttcctaaagggtgcccaaagcttcccggctgatccacagtgtgtgggccccgcagccccagaggcacgggcacgtgcggcgcctgcacccctttcttcccgccctcagcagctgccaccacatcccacattcacaccgtctgtccctgggccccacgcaccacacactcccaagacaagctggatggacgaggcgtgagcgaagccactgcctcagcccaggctggggccccgcctcacaccccagggcgtgcctcggcccaggccccgaactctgccttcttcttcccaggtggcttcaggcaccaccactagggactggaaccccacaggtgcccatccgtgccagtgccaggggtgctacggctcgcccgaggctcagaggaaggtcctcatggtggcagagttctaagtgggaggaaattcagcaccggcatctgcccgaggcagaccccagcgccagccggccagagagggcagccgacatccacaggttcccggggtattgctggtgcccgatcacaacgccaggctccatgttcacagggtgctgcagggagcccgttccggagaacccagctgtgcagagccgctccagggtgctggccggacgcttgagaggcaggggcaggctgtcactgtcacggtatctggcacaaccgcagacacacagagcaagcagcggccagagacagacccaggccgtcttctgaagactcgggccaggccgccgcagggaccaggagaagacagggtgggccggggggcagctggggagacttcccgcctggccccatcagtgacactggccgtagcagccctcacttcctggtggctccccgcccacgccggctcttccccgccaccgtgggcggcagggcccagcacccccaccgtcctctcaccgccacttggggacactgcggaggttgcaggcgttcgggggtggggggtcggcaggcagagctggaaccaccctaggaaccacccagagacggggaggtcaggggcaaggacggcacgcagggccacctccctgcgcccgcctggttcctgggggctcagtgccctcagcagctctcgcccacaccctacagtcacagctccagtcagtgcctcctcagcaggctcgagtctgggtctgcgcagccgcctgtggcctgagctccagctggcctgtctggttcctgccgccacacgccccactctggctgacgctccctttgctgctcagacacccagacaccctcgtcatcgccttttttttttttttttggaaggagtcttgctctgtcacccaggctggactgcagtggcacaatctcggctcactgcaacctccgccttccaggttcaagcaattctcccgcctcagcctcctaagtcactgggactacaggtgcctgccaccacgcctggccaatcttttgtatttttagtagggatggggttttaccatgttagccaggctggtctcgaactcctgacctcaggtgatccgtccacctcagcctcccaaagcgatgggaccacaggcgtgagccaccgcgctcggcctcatcacagcctttcatgggggcaactgctgcccctgtgccgtcgtcgcctgagcccccgaccgcaagtgtggctccccgctcaggacaccctcacgagtcaccaggagagcggccaggtgccggccactctgcacacacgtgcccaccagatgccacggggagcgaatcgcatcactaaacccacttggcaggtgaggagactgaggccaaggctgcccagcagagaatgacccagctgcgcggggcctcagcctgatcccagagcccaggacagcaaaggaggcccggaacggcccagctgcctgggagaagccctcgtgggcaggcacacagcccatggcagccagtcccccctgcgtcagaggcaggcaggagcttcccgacagccagcccaggtgtctcagcagcagcagtgccgcccctgactcagccgccgggcaagctccccagcggcagagacgccccgtttcgagggcactggttgtggctggggactttccccattgccagatacggagcagccgtccctccccagaacaaacgccaggtgtgcccatttcccagcataaaaaattcgtttttgagacagcgtcttgcttgtcacccaggctggagtgcactggcaccatcacggctcaccgcagcctccacctcccaggctcaagcgctcctcccaccacctcagcccccgccagtagctgggactccaggagtgcaacaacacaccccactaattgttttagtcttctgtagagacagggtcctgccacgtacggagaagttctgacactgccatgctgtctacgggcgccttgttgcgtcctgctccaaaggcacaagcagatgcccttgggatcacccgcggggtggacacgggcaggcccccgcagccctctctgcagttatttgctcttaaggaatctaccaacgtccatgattaaatatttgtcaatcactgttccatgctggctccctggccagcctgtaaattctgtgagggcaaagaccacagcggcctgtcaccacagagttcctttcactacaggaaggccctccccaggcccagtgacagtcggaggaggtcaaggtcctccgtgtccaaggccacggggcgaggaagtggctccaccacaccaggatccagtcctgtgcgggctctaggagcagctaaatgtgcagccgagtcaaggcagtgtcggccccccacagccaccactccaggcttcccaggggcttcccaggcctgtcccagggctcaaggggctgcaaggggctgccctgcaactcacccaggctggcgggctgtcaggcaaccagcctctcctgccacggccagtggggacagaaagctggaagaggcaagagcgagacccctgggagacagaggagtaaggcaaggctcagtctcagctccccaaccttcgccccacacccgagatttcactttatttgttcctcctgctggggaggggaagccctgtggcttcagtagagaggaaaccacacctctctctttccactcctgggcctggccccgctctcccgccatgccccaactctagcactcgctcctcctctgtgacccagagacaggcggcttctcctgactccctccagccccttcctgggtctctactcccggggaactgcactgcttctggggggcttggacttctcttacgggtcaaagcgtagcaacagccgggcggctacgtacacagcacagtaaatcctcaatgcctgcagcctcttcccctgggcacagggtggggagtccagacccctccacctcctgcggctgctcccctcaagctggccaagcggctcccgactgagccggctctgccactttcccgctgagccaccacgcgcctcagtttccccatctataaagcacgggtggctcgactaaatcaccactttgcacgtcagcctggcgaagggcaacacgggttaaaaatgcagaccaccgccgggcacggtggctcacacctgtaatcccagcgttttgggaggctgagccagaagaatcgcttgagcccaggagttcaagaccagcctgggcaacacagggagaccccattcctaaaaataatattagaaatgcagactgctgagcgcattccacacctactgactccgaaaccctggaaaaggggcctggaaatagcaccttcaacgagcgctgctcccacctcccccaaggtgacatcaggtccgcgtgggaaacactgccctaaacgagcaggaagtagcactcggcacgcccaggcccagggtcctcttcggtgaggggcggctgtaaacacctggaggaagggtgggctgcgcagccaagccccgggaggggaggaacgcaggctctgctcacaaagccccgccggcgggccgcggtcggaccccgggacagtgcctggggcgttccgggcctgggcctgcctccaaggcggcggccagggctccacgaggcgagcctgcagcgaggcgccggcgcccccaaccacgcgctcggcgggggtcccctggcgttattctcggggtccgagccccgccaggcccagcccctgccccgcgccgcgccaccgggcaataccctctctctgctcgccgggcctcagtttctccgtttgcaaaaccaggctcaccgggcttagggatcccacctgggatcctcgcggcctctcgggtcgggaacgccgcggatgtggggtcacccggccgcgatcccgctgcgccgctccggccaggccctgcctcccgcccgggcctcagtctcccgcatgtacaggacggggttcgcgcgcgcaccgcccgggctccccgcggattcagcctgggccggcgctgccccgagcctcagttttcccgtcgtggtcagctcgcgcaagaggcgggcgcaagcgacccccaccccggccccggccttgcctcaggcctgcggcgcagaccctgccgcccgccgccccggcccgggcctcaccggcaggcgcgggacgatctccacggagcagcagtggcagaagtaccgtccgggatgcggcgacgcctcggccatggccgccgccacctactccgcgccgcccgccccccgcgcggcacccgccgccggccgtttgctgctccctcgccggccgacgcgcccgcgcacgctcacgcacggcacgcacggcacgcggggcggagcgggggcgcgggagcggcgaaagctgcgtactcggcgggcagcggcccgggcgacggtggccgctgagagacaaactaggcccggccgttgggcggggctccaagcgggggcggggcttccggcgggggcggggccaaagcaggcggcggaagagacgagaagcggggcgtgcgcggggcggggccgaggccctcctcccctcccgaagctgcccaggccttcgtgtccctcagtgcttccctacctcatcgccgtctcccctcacggtacttcagcccactgtccccaccgttcctggggctcgccaggcgccctctcccccgcccgctgcccggtgcagcgctctcccgacgcccgcgtggctttcttccaggtctttgctcaaatgtcagcttacaaggtcttctctgctgccctcctgctccgtggcactgattccctcccgatgcactgtcaggtcagctgcgcagcaaagggatttttggacccgcagcagcgcctgacacacagcaggcattccctcagcgctgcggaatacaggcagacccggggctcagggcgctgtctgggcctcactgggacccgtggggtcagacagaggctgaggtctgtgggttgtggccttgtttccaagatgctccacgggctgacggcccaggcgcctctcgggtgcggagaaggcaggaaacctaacccctgcttccaaatttaatcagtagaaacggtatcatcacccagcacaggccaggatcatttctgaggttagttctggcccaatcatgcatgcatttcttttttctttttttttttgagacggagtctcactctgtcacccaggctggggtgcaatggcccgatctcggctcactgcaacctccgcctgccgagggttcaagcgattctcccgcctcagcctctcgagtagctaggactagaggcacccgccaccacaccggctaatttttgtatttttagtagaaacgggg[136 bp omitted]ctcattgagcaactactgcacaccagaccctatgctgaatgcacgcagatacccccagtcccatgagattggacaggagcgtggaactcaagggtgactctggctctgcctggggaaagagagagagggcttccgaggggtaaggacattggaaccagggctgagggatgaataggatttggttggagttggacttcctgcaaaatgaggcattggagcgagactgttgaggaattaagagttggagcctgtgcatttagattttttgtttgtttgtttgttttttagagatggagtctggctctgttgcccaggctgcagtgcaatggcgcaatctcggttcactgtaacctccgcctcccgggttcaagtgattctcctgcctcaggctcccgagttgctgggattacaggctgggcaccaccacgcccgcctaatttttgtatttttagtagacggggtttcactatgttggccaggctggtctcaaactcctgacctcaggtgatccgcccgcctcggcctgccatagtgctgggattacaggcgtaagccaccgcgcccggcctgcatttagggttttgaatgtccagaggttggggacaggggcttcagcctccttccagtcgtctttgcagcagcgcgaatccagtcattcctgctctgaccaccagagagcgcacgggccccgtccctgggaatccaggaaaaccccaggctggggaggggcgaggcttgccagacgcagcccctgcaccagccttcacgctccgcaagtgcaggaggagcagcaggcctggttcaaacgacgccaaaccacgaactggctgtgtgtccctaggcaagtggcctaacctctgagaaggcggcagaacctgacggttttccgttggctcggagcagacatgaggaccgctggcacctcctcagccctctctgtgctctgctgcctgccccgagtcacctgcccctcgctgacccctccccagcctcactggcccccttgggtgggctaagcaggttcccacctctgggccttgcaaggctgtgcccttccccaagtcccctctccttcccctgcttttttttttttttttttttttttttgagatggagtctcactctgttgcccaggctggagtgcaatggtgcgatctcagctcactgcaacctccgcctccaggggtcaagcgattctcctgcctcagcctcccgagtagctgggatcacaggcatgcgccaccacgcccggctaatttttgtatttttagtagagctggggtttcgccatgttggccaggctggtctcgaactcctgacctcaggtgatccgcccacctcggcgtcccaaagtgctgggatgacaggcgtgagccaccgcgcccggccctttcccctggtttttaggaggctgccccatccaccactgcaccccacttctcagagccccctttccatcccccacagccatcctcacatctgtgggttattaatggcgtctccccatatgtgaggccaatacccagcgcaccagtaggtgttcagtagattcccaaatgcaccaacagttgccgagtgtctactgtgtgctgggctcaagcaggtgctggaaacacagtgggaatgagaaggaacgtagggattttgtatcaaactaagcagggcgaggtggctcacgcctgagaccaggagttcaaaaccatcctgagcaacatagtgagaccctgtctctacaaaaatagaattaggccggggacagtggctcatgcctgtaatcccagcaccttgagaggctgaggcaggaggatcacttgagtccaggagttgaagaccagcctgggctacatggtgaaaccgtgtctctactaaaaatacaaaaattagccaggtgtggtggcgggcacctgtgatcccacctactcaggaggctgagacagaaggatcacttgagcaggaggcagaggttgcagtgagctgagatcggaccactgcactccagcctgggccacagatggagaccccatcttttttgttttgttttgttttgttttgttttgtttgagatgggtctccctctgccgcccaggctggagtgcagtggcatgatctgggctcactgcaaattctgcctcctaggatcaagcgattatcctggctcagcctcccaagtagctgggattacaggcatgtgccaccacgcccggctaatttttgtccttctagtagagacggagtttctccatgttaagtaggctggtctccaactcctgacctcaggtgatccgcccacctcagcctcccaaagtgctgggatcacaggcgtgaggctaatcgttttaaatttttattttgtagagataggatctggctatgttgcccagagtgatctccaactcctgggctcacgggatcctcccaccttggcctcccaaagtgtggggatcacaggtgtgagccagagtgcccggccacccctttatcccaaacacaccaaaaagcaggctgctcttccctgaaggcagtagcacattgatcaaatcggccagtgggcactgacactgctgcacacaaatgcacacacttgcaccctgccccaggccccaccggccaccctggttccacagacggcaccgtttctcccatttcctctcaccagggacctcgacaggtgtgggcttggttccgtgagctctcttagcccctttttcaattcaggatcccgtccccgtgaaccctgggggcctcggcaaacatgagacgagaggactcctaaaggaatgacacgcgccactccctccggggcagagaggtgtgttgacagctcattctcacgtcccaggcagaccaagcccaggtggaccacgtcccaggcagaccaagcccaggtggaccacgtcccaggcagaccaagcccaggcggaccacgtcccaggcggaccacgtcccaggcggaccacgtcccaggcggaccaagcccaggcggaccacgtcccaggcggaccacgtcccaggcggaccaagcccaggtggaccacgtcccaggcggaccacgtcccaggcggaccaagcccaggtggaccacgtcccaggcggaccatgtcccaggcagaccacgtcccaggcagaccaagcccaggcggaccacgtcccaggcagaccacgtcccaggcggaccaagcccaggtggaccacgtcccaggcagaccaagcccaggcagaccacgtcccaggtagacctagtggttgtgtattcacttctcccaacccccctgggaagaaataactgcagctggccccattgcaccaatgaggaaactgaggcccagggaggaagccgattgcctgaggcggcagctttgggactggactgtggctgcctcctgaggaaggaaacagttcctccctccaccctcatcctggcaggggttgggccaccgttgcttcatcaagtgtcgtggagcctccgctctgtgccaggagcggggcctgtgccacaaacgtctgctgaaaccagccatccacccaacagtatcgagcaccatgatcggaagagtaaaggccccaaactgggccaggggcggtggctcattcccgtaatcccagcactttggaaggctgaggcgggtggatcatttgaggtcaggagttcgaggctagtctggccaaaatggtgaaacccatctctactaacaaaaaaaaaaaaaaaaaaaaaaaaatggccgggtgcagtggctcatgcctgtaatcccagcactttggaaggccgaggtgggtggatcatctgaagttgggacttcgagaccagcctgaccaacatggagaaaccctgtctctactaaaaatacaaagttaaccaggcatggtagcaggcatctgtaatcccagctactcgggaggctgaggcaggggaatcgcttgaatctgggaggcagaagttgcagtgagccaagatcttgccatttcactcctgcctaggcaacaagagcaaaactccatcttgttaaaaaaaaaaaactagccgggcatggtggtgcctgcctgtaatcccaggtactcgggaggctgaggcatgaaaatcacttgaacccgggagcagaggttgcagtaagctgagattgcaccactccactccagcctgagagacagagtgagtgagagacttcacctcaaaataaataaataaagtccccaaacacacttgattttagcccagcaagactcatgtctgttgcgggaagtcagggaccccgaacggagggaccgcctggagctgtggcagaggaacataaattgtgaagatttcattttaatatggacatttatcagttcccaaattaatacttttataatttcttacgcctgtcttactctcatctcttaatcctgttatcttcgtaagctgaggatgtatgtcacctcaggaccaccgtgataattgtgttaactgtacaaattgattgtaaaacgtgtgtttgaacaatatgaaatcagtgcaccttgagaaaaaacagaataacagcgattttagggaacaagggaagacaaccataaggtctgactgcctgcagggtcaggcaaaaaaagccatatttttcttcttgcagagagcctataaaaggacatgcaagtagggaggatatcgctaaattcttttcctagcaagcaatattaatattaataccctgggaaaggaatgcattcctggggagaggtctataaacagctgctctgggaatgtctgtcttacgtggttgagataaggactgagatacgccctgatctcctgcagtaccctcaggcttactacggtggggaaaaactccaccctggtgaatttgtggtcagacgtttccctattttttgttcaagatgtttatcaagataatacgtgcaccgctgaacatggacccttatcagtagttctgtgttgccttttctcctgttccctcagaagcaagtgatctttgttctgttttttgccctttgaagcatgagctctactccatgttctcacaccccctcccctcttgaaacccttaataaaaaacttgctggtttaaggctcagggggcagcacgatcctaccgacatgcgacgtcaccccccggcggcccagctgtaaaattcctctctttgtactcttcctctttatttctcagccagccgacacttatggaaaatagaaagaatttatattgaaatatggggggaatgggtccccccgatacatgtcagatttcttttatttatttatttatttatttatttatttatttattgagatggagtctcactctgtcgcccaggctggagtgcagtggtgccatctcggctcactgcaagctccgcctcccgggttcacgccattctcctgcctcagcctcccgagtagctgggactacaggcgcccgccaccatgcccggctaattt[131 bp omitted]atttatttattttttttgagacgggggtctcgctctgttgtccaggctggagtgcagtggtgcgaactcggctcaccaaaacctctgccctccaggttcgagcaattctcctgcctgagcctcctgagtggctgggactacaggcacccggcaccacacccagctaatttttgtatttttaatagagatggggtttcaccatgttggccagactggtctcaaactcctgaccttaagtgatctgcctacctcagcctcccaaagtgcaggaattacaggcgtgagccactgcgcccagctgttttgttttttgagatgaagtctcactgtcacccaggctggagtgcagtggcgcgatcttggctcactgcagcctccgcttcctgggttcaagtgattctcctgcttc[137 bp omitted]cagcctcccaaagtgctgggattacagatgtgagccgtggcacttggccagtggggttgctttagggcccagctcacaccgcacccggctgatggggttgttttagggcccagctcacttcccagtgttcccacaccgcccaccaggccaggccttcaggcctgagccatgttatcagcatcacaggctccggagtccagcaagtctttgcctcctggagcccaggggttggcaagttctagctcagaggctgcagacaatagacagtaagccaatgccaagtatctttgggctcaggaaggtgggaccgggtgtccctgactgttctgtaccaagccacaacccgcttcccatcctggaggccgaaggtggtaccgcagggtgagctccctagagccccacagaacacgctgctctgggtcctaaaggctctccttgcatgaatgcaaacctgctgactacaaagatggttattattatcagctccaaggtacagaaactcggtttaaactggcttcatctccctgcggaggaggagttcaggcacagctggatccagggacctccaatgtcactgggaattgttgctgtcccctttggctctgtggcccacggggctggcctctccctagccatcagaaagagccacctgcaatttcaggctcacacctctccagccccagcaggaagcaggtgtccctgtccctctcccagcaaaattccagggccgttggccaggcgtggtggctcacacctgtaatccccgcactttgggaggccgaggccggcggatcatgaggtcaggagttcgagaccagcctggccaatatggtgaaaccctgtctctactaaaaatacaaaaattagccaggcgtggtggtgggcgcctatagtcccagctgctcgggaggctgaggcaggagaatcgcttgaacctgggaggcagaggttgcagtgagctgagatcacgccactgcactccagcctgggcaacagagcaagactccatcttaaaaaaaaaaaaaaattccaggactgactcgtcctggtggttttgtgttttttttgagacagagtctcactctgtcacccgggctggagtgcagtagtgggagcagaaagggggaaccagccccaggctggccctcgtcgtgtggtccatgggaggcacaggggtcctggaagcttctgaacctggtgctgaccctagtcctgactctgcaggtctgtgtgactccaagaaaatcacttcccaccctccaacctcatccctataaatggggcgcctgcctcacagcctcccagcaagcagcaaaggggactcaccatggtcccgttctgcacgagcacccattgactgggtaattaacaggaatctatgcacgccatggccctactgtgcgcctggcactgtccacatcccacctggaacctctaacactggggtctgtgcccatgttacagataagaaaacaggcataggctgggcacggtggttcacgcctgtaatcccagcaatttgggaggccaaggcagctggatcgccagaggtcaggagttcgagaccagcctggccaacatggtgaaacccatctctactaaaaatacaaaaaattagctgggtctgctggtgcatgcctgtaattccagctactcaggaggctgaggcaagagaattgcttaaacccgggaggcagaggttgcagtgagccgagattgcgccactgcactccagccttggcaacaagagcgaaactctgtctcaaaaaaaaaaaaaaagaaagaaaaagaaaacaggcctagaagggtcccagggcctggcacacagtgggcacccacggctgctataacaaatttgcacaaactgcctggcttaaagcaacacacgggctgggcgcagtgtctcatgcctgtaatcccagcactttgtgaggccaagatgggcagatcacctgaggtcaggagtttgagaccagcctgaccaacatggcaaaatcccgtcactgcaaaaaaaaaaaaaaaaagtagccgggtgtggtgggaggcgcctgtaatcccacttagtctggaggctgaggttgcagtgagccgagatcgcacctctgcactccagcctggacaacagagtgaggccctgtctcaaaaaaataaaaatggccaggcatggtggctcacacctgtaaccccagcactttgggaggccaaggcgggtgaatcactgaggtcaggagttcaagaccagcctggccaacatggcgaaaccgcgtctctactaagaatacaaaaattagccagttgtggtggcaggtgcctacaatcccagctactcgtgaggctgacgcagaaggattgcttgaacccgggggcggaggttgcagtgagccgagatcgcgccattgcactccagcctaagcaacagaacgagactacgtctcaaaaaaaaaaaaaaaaaagttccacacgggtctggctgggagaagatcgaggtgttggcagagctgcattccttctggcagctccaggagagaatctgttccgcgcctttccaggctcctagaggccgcccacattccctggcttgagcccccttcctccatctccaaatcccgcaatggca[141 bp omitted]tcccaggttcaagtgattctcctgcctc[216 bp omitted]tttaccatgttggccaggctagtctcgaactcctgacctcaagtgatctgcctgcctcggcctcctaatgtgttggaggttcacaggtgtgaacctaatgtgttggtggttcacaggtgtgaaccaccgcgcccggccaggcatctcctcttctacggacccttccaggacagtgggccatccgtataacccaggatgaacccctgtgtgaaagccctcaactcagtcccatctgcagagcccctttggccagggagggtgggacacccacgggttctagggatgagggccccatggtctctgggaccgccgttctgctgaccaccccccactgctctccccctcactcacagcacaagcgtctgtttccagcgcacacccctgccgctccgtctgacgttcgagtctcaacctcaacgtctctttcctctgggaagccttcctcagtctcccccaggcccgggtcaggcctggggcacctttgccatctgggcatcctccgccacagaacaacactggattgtcactgtctgtttacctgtcaggatgtacctggagggagacagaagcctggggggtgagcagaggccacgaggagccacggtgggtgtctgagccagggagaagtgttatggcagctggggtaggaagtgggccgcaggggccaggctgcgggctggaagtcctaggatgagcctcgggcctggatagggtggggagaggggcagagccgggagaggggaggtcatcactggggtctcaggaggaggcggcgctctggaaagggtcagtgacctgttagaggtcaccctgcacagagcctctgggttagggaagacagagccgggagcaggaggccactggcagctggcctcggtttccccggagagggccggaacccacgccagccagacaatgaccctttgattcgcacagcccaggccggagtggccaagccacggcggggtcaggtcttggccaaggtcacactgtccagcccccgcacatcctcagtgagaacacagggtcccatccctgccccactccccaatcccgggagagtcccgggggaatgccagaggccaaggccaggtcgagacggcggggtgtcccccgtcagtgagaacacagggtcctgtgcctgccccactccccaagccggggagattcccgggggaaatgccagaggccaaggccaggtcgagacggcggggtgtcccccctcagtgagaacacagggtcccgtccctgccctgctccccaagccggggagattcccgggggaaatgccagaggccaaggccaggtcgagacggcggggtgtcccccctcagtgagaatacagggtcccgtccctgccctgctccccaagccggggagattcccgggggaaatgccagaggccaaggccaggtcaagacggcggggtgtcccccctcagtgccactaaggcagaacttggcccctggccactggctgctgggggacacaggctgggcagctaaggtggaggaaagggtacaggtgtgtcttctgtgggcacagatctcactcaggccagagaaggggctgtgccgtggggctgctggacacgtccgtttccacctgcggggtgggcaatgccggcacagcgagtggccagacacaggcatgcccagcagacacccaaccgctctccaccacctcaaccttctgtattttcctgaaagcatttaccactccttgaagttatagattaatttgtctctgcattttgttgtccaaaccaggagctcggtgagggtgtgatggggtctgccttggtcaccgtggcaccccagcaccccgcagggtccctctggccaaaagagatgttcactgatgccctagaagcaggaacagaggggctcccctgcgctcgccaagggcgcctgacaaatctggaggcccccatgacagaatcagctccagagtaggaaatgtgtctggctgcacgaaagccccctcgggcgcagcgcctccaggcccacgcagatgtcgctgtcatacattgttggaaacgcctctgctggaaacagtgtttgctgaatcttggagggagaggaaaaaacctagtaaacattcttgttgaggtgatctgggggaatgtctgcaaaggcttggagggctgatggggcagagctgcccaggggcccaggacaaaggccaggcgtgcgcgcgcacacacacacacacacacacacacacacgcagtggcctccctgggggccgtggctgggcgaggcctgctgttgtccgagatgctggaaggagctgtgtctctgggtctgtcccggccgcaccccgttctgtcccacacccaaccactccccacccacaggccggctccagcggccaggtggacgggtgcgcggcccgcgctgtgagcagggaaccatatccagctgaggttttgggtgtgtggggcgggtcgggaacaaggaggccgggttggggggctcagaccacacttggaccatgaaagtgaccacatgcaaatcacagaaacgggatgcagggatccacagacgtgctcctcttgggtccccgttacctcaccgccacccctgaaactgaagacccccaaacccactttaattcctggagacggcccctcgatccacccaaaaggctgccaccacctcgaacccacacccctgtcccggttccgccctgggtccagccacatctccccaaatgcattctctggctccggaaggggacccgggcgctcgcccccaactgccccccgcagcggccgggcccggcgcctgcccaccccgcgcgggacacggcctcgcccccgccactcccgcgccgcgccccgccccgcgccccgccccgcccgcggcccgcgggacctttatagggagcgccggccgcgcgctgggaagtcggtgccgctgccgtctctgcgttcgccatgcgtcccggggcgccagggccactctggcctctgccctggggggccctggcttgggccgtgggcttcgtgagctccatgggctcggggaaccccgcgcccggtgagtggggcggccagaggggcgggcggggcgggccacccacgtggggctgcgcggaatgcggccggggggacgtcggggggcgcggcggcggcggcgggggcgagggcggtgtccggcgcaagctggagccgggaaggtctgaaggagggtcaccaagaggtcagcagagcagaggtttctaatcacaatgaccgctgacatttattgagcgcttagtgtctacctctcccctccctgaacctgtgccatcccgatagtgccggagctctcttcatctccgtcttccagatggggaaactgaggctcagggtcacacagcctgtagcaggcaaagccagggttctagccgcgaccgtccgggtcggtcctggtgccgagaggtagtgctgggtgtcgggagccaggccctccagctggggctgagagctttcccgggtcctgggtagacggggcatggagtctcacacctgggacttgccgggaggtgccaggcaggagacggccccactcctggcctcagtttcccctcctatgatgggtgccaaggtgctgcgttccacaagctggtccctggcagtgtctgtgaaccagcaagcgctctgggatgggggctgtggccgttcctgcccccagggacgggggaagaaatggggggctctctggctccccaccccccatccctgcagccccaccccaccccagccctgcgccaaagggagagcagagccccctccccgaaggccacgtccctggggagacagtgagctcatgcaaggggaatgttcccaagttggagtgagtaagaggcgggccaggcggtgggggggctgccaggcgcggggctccgcgtgccctcgccctcgggtgctgtctagacagagggcagaggcgggagaagcggctccagggcctgctgaccctgacatgcccagtgcctggtgtttggtggtgtttgaggggttgggcagggtgccagcccctggcctgggggcttggagggtacgggaagggacctcctggggtgggtgggggttggtggtgaggctgtgggggggggcacgtggagctcagaggggaggagacatttccagggttctggagccagggtggggacacccatgtggttttctgccccttcttcctgggtgggggtagatcattccgtgcgtaactactcagcaccacctgcatgcatctgtgggcgggccagaagctgggtgtcaggagtggcccaggagagcaccccgttccccggcccgcaggtggtgtttgctggctccagcagggccaggaggccacctgcagcctggtgctccagactgatgtcacccgggccgagtgctgtgcctccggcaacattgacaccgcctggtccaacctcacccacccggggaacaagatcaacctcctcggcttcttgggccttgtccactgccttccctgcaaaggtgagacctcaggccagaagcagggcagacgtctcagctcaggaccagccacaaacagtcatggtggtcgagggccgaacgtccagggactgagcccgtcacaggggtatgtaggaggctgcagggggatcccagcctcagagagggactggggggacttcccggttcccaggctccagcctcttgcagctcaggactcaggaagagaccacgtggctccagcctttgctggggctgagctctctgcctgggtggctcttcccacctggtcgataaatgtctggcttgcacctagctcctgggaaggtgggtttgccattctggcctgtgaccccaaatgtccacaccagggaccttcactgcagactccagggtctgcggtggggttacagctgcatgtttaacaagcatttgcctcgggaccctgttttgagaggatgcctcccacatcagactaggggctcttggttggcgagtggcacagaacgaatgaataagattctccgcactggaggatgatggttttttttttttttttttttttttttcctgagatggagcctcgctctgtcacccaggctggagtgcagtggtgcgattttggctcactgcaacttcggcctccgaggttcaggtgattctctttcctcggcctccccaggggctgggactgcaggcgcgcgccaccacacctggctaatttttatgtttttggtagagacagggtttcaccac[138 bp omitted]ggtgttgggggatgtctaggagtttgccagatggggccggtatgggagagtggatcaggagagaacatggcttgaggttaggtcctggtgggtggggtcaggcagaggagccaaggggaggctgaagctgagggctgcagacccgaaggccaggctgaggaactctgctggcctctgagatgtgattaatcccagatcagcctggctgggtggtcctgaactcactgccacatacccctgctccctccagacccccctctggcttctgggagaaggacagtcttcaaaaagtgcctggcctgggcatgagacggcccaggaccccccacccccaacctcatctggccctggggacggaactcaggcccccttccgttctcgctcgcataaaagccaccctggccgagcatttccagatgtgcctgtgagccgctgtgccggggccgcccaggtgcggcccacatgccctgcaagggctgcgtggcgggcgctggccatcccctaaggagtgccgcactgccttggaagtggggctccctcgtcagccccactttacacacagagaaactgaggctggcacataaactcaacagctgtgttcagaggccctaccagacccccagataacagaaagggggttggtcatctgggtcctggctgcagctttcaaactgaggtgcttgggcccctgcactcatagctgcgacccggcctcagtttccccatctgtaaaatgatgacttgggaagatgcgataagcctaggaggcgatgagcattcacattgaaagcgggggcggggaccccagagagagcttccctagcaggacctcaatatccctgtctgagcagcggggctgcggggcagctcctggttcagaggcctagggctgtggggggccccctcccctggaatcgctccccaggccaggagggccgtccagcgccccgccctccccgacgcctcctgggggaaggtcctggcagccccagactcgcgcctggcaagggcggaacaccccaggctgacgcagctggggcccctccggccttcccagaagagcgcgtgcatcgggagcagacgtcagccagctgcaaggaggagcggcccggggctgcgtagctccgctggaccccgattccgggcagagacccccccccgccccggcccgcgcgcaccgagcccagcccccgccccccagcgcaggcgcagcgcggacctcggccccaccggtcccgcgcccggaccctgagccctgcccctgggaacccgagggccccgactccgactgaccctgacctgggacggcgcccccgcctccgccctgcagaaggggcgcagggaggggccccgaggccttcgcgcggccccacgcccgggaccctcccgcgcccggccccacgcgcgtgtcctctgtccgcagattcgtgcgacggcgtggagtgcggcccgggcaaggcgtgccgcatgctggggggccgcccgcgctgcgagtgcgcgcccgactgctcggggctcccggcgcggctgcaggtctgcggctcagacggcgccacctaccgcgacgagtgcgagctgcgcgccgcgcgctgccgcggccacccggacctgagcgtcatgtaccggggccgctgccgcagtacgtgggggcgtggtctgtggaggggcggggcgggacctaccggacctgcgcgtcatgtatcgaggctgctgccgcagtaggcgggggcggggcctggggcgggaccacccggacctgagcgtgacgtatcggggctgctaccgcaatgcgtgagggccaggcctgcgggggcggggcctgctggaggggcggggcctgctggaggggcggggccgctgccgcagtgcgtaggggcggggcctccagcccaggacaggtcacatgggtggcggtggggcctgagtaagggcgtctttatacttccgagggagtatcacggggtagggtcttttgtagggttgggatttggaaaatagtgggcctctgggggctcacactgggcaagaggtatgtggcatggtcagagcgggagcgtgactcagagaggggcttgtgggtgtaaccagaggggcatgatggaaccaggggggtgagactgggtcatgtaaggggcggggctcttggctggggcgtggttcctgggtggagatgggcggggatttgtgggtggagtttgggtgggcggccccgcagtcgcggaggggcggggctttgggtagcataaggggcaggagctcacgaaagaggtgtggctcctgggtacaatgggaagggcagggcttgtgggtggagcctgaggggtggaatggagaggggggctcacggggggcgggggggtgcttgtgtctcctaccagagggttttcgcatcttgggggttaagggtgggtcttggggccaagagccctgcggggttctcagcgagatgtcccctgaacttcccctggcacccggcctgcagagtcctgtgagcacgtggtgtgcccgcggccacagtcgtgcgtcgtggaccagacgggcagcgcccactgcgtggtgtgtcgagcggcgccctgccctgtgccctccagccccggccaggagctttgcggcaacaacaacgtcacctacatctcctcgtgccacatgcgccaggccacctgcttcctgggccgctccatcggcgtgcgccacgcgggcagctgcgcaggtgcagacgcagggcgggggcacaggcctgtcctgggggccggagaaccccctgccctgcgccctcaatgctcttatcgacccttgcaggcacccctgaggagccgccaggtggtgagtctgcagaagaggaagagaacttcgtgtgagcctgcaggacaggcctgggcctggtgcccgaggccccccatcatcccctgttatttattgccacagcagagtctaatttatatgccacggacactccttagagcccggattcggaccacttggggatcccagaacctccctgacgatatcctggaaggactgaggaagggaggcctgggggccggctggtgggtgggatagacctgcgttccggacactgagcgcctgatttagggcccttctctaggatgccccagcccctaccctaagacctattgccggggaggattccacacttccgctcctttggggataaacctattaattattgctactatcaagagggctgggcattctctgctggtaattcctgaagaggcatgactgcttttctcagccccaagcctctagtctgggtgtgtacggagggtctagcctgggtgtgtacggagggtctagcctgggtgagtacggagggtctagcctgggtgagtacggagggtctagcctgggtgagtacggagggtctagcctgggtgtgtatggaggatctagcctgggtgagtatggagggtctagcctgggtgagtatggagggtctagcctgggtgtgtatggagggtctagcctgggtgagtatggagggtctagcctgggtgtgtatggagggtctagcctgggtgagtatggagggtctagcctgggtgtgtacggagggtctagtctgagtgcgtgtggggacctcagaacactgtgaccttagcccagcaagccaggcccttcatgaaggccaagaaggctgccaccattccctgccagcccaagaactccagcttccccactgcctctgtgtgcccctttgcgtcctgtgaaggccattgagaaatgcccagtgtgccccctgggaaagggcacggcctgtgctcctgacacgggctgtgcttggccacagaaccacccagcgtctcccctgctgctgtccacgtcagttcatgaggcaacgtcgcgtggtctcagacgtggagcagccagcggcagctcagagcagggcactgtgtccggcggagccaagtccactctgggggagctctggcggggaccacgggccactgctcacccactggccccgaggggggtgtagacgccaagactcacgcatgtgtgacatccggagtcctggagccgggtgtcccagtggcaccactaggtgcctgctgcctccacagtggggttcacacccagggctccttggtcccccacaacctgccccggccaggcctgcagacccagactccagccagacctgcctcacccaccaatgcagccggggctggcgacaccagccaggtgctggtcttgggccagttctcccacgacggctcaccctcccctccatctgcgttgatgctcagaatcgcctacctgtgcctgcgtgtaaaccacagcctcagaccagctatggggagaggacaacacggaggatatccagcttccccggtctggggtgaggaatgtggggagcttgggcatcctcctccagcctcctccagcccccaggcagtgccttacctgtggtgcccagaaaagtgcccctaggttggtgggtctacaggagcctcagccaggcagcccaccccaccctggggccctgcctcaccaaggaaataaagactcaagccattttggggtgtccaggcctcagtttgtctcctctctcaaggcttcaggccgcccccacggctgtgggatgggcagcctggggcctggggtgccgcatgggtgctctggaggcacgggaagagagacccagcattagtccttgggcagcctctggccgcctctgggcctcagtgcctctccaggcagtggacaagcccgggaggggctgaggcagagcgggaggggagggagagaaaggaggtcttttgggagggcacacaggatagacaagatggcttagggcagccctaagacaccagctggcttgggacccagaaatggaggcccggtcttgaatgacttgggtgtaacgatagcagtaataaaaataacaggattagggcccgggtggggtagctcacccctataatctcggcgctttgggaggccaaggcgggcgggtcacttgaggccaggagttccagaccagcctgggcaacatagtgagaccctcatctctacaaaaaaaaaaaaaaaaaaaaaaaagacccaggcatggtggcatgctcctgtggtcccagctactcaggaggcggaggtgggaagatggcttgagcccaggatgtcaaggctgcagtgagctgtgttggcaccactgcactccagcctgggtgacagagtgagac[133 bp omitted]aactccaatctcggtgagccgagatcgtgccactaaactccagcctgggggacagagcaagaccccatctcaaaaaaaaaaaaaaaaaaattagccaggtgtggtgtcatgcacctgtagtcccagctacttgggagggtgaggcaggagaatcgcttgaacctgggaggcagaggttgcagtgagccgagatcgcaccactggactccagcctgggtgacggagtgagactctgtctcaaaataataataataataataataataacaacaacaacaacaaaaaggcccagcgcggtggctcacccgcgcctgtaatcccagcactttaggaggccaaggctagcggatcacgaggtcaagagatcgagaccatcctggccaacatggtgaaaccccatctctactaaaaatacaaaaaattagccgggtgtggtggtacatgcctgtagtcccagctagttgggaggctgaggcaggagaatggcttgaacccaggggcagaggttgcaatgagccgagattgcgccactgcactccagcctggtgacagagtgagacgtcatcttaaaaaaataataggccgggcgcggtggctcacgcctgtaatcccagcactctgggaggccgaggtgggtggatcacgagatcaggagatcgagaccatcctggctgacacggtgaaaccccgtttctactaaaaatacaaagaattagccgggtgtggtggcgggcgcctgtagtcccagctacttgggaggctgaagcgggagaatggtgtgaacccgggaggcggaacttgcagtgagccgagatcgcaccactgcactccagcctgggggacagagcgagactccatccaaaataaaaataagtaaagataaaaaaataaaataataataaagaaaataaaatctaaaaataaaaaaataataacacaataacaaactgtgacaataacatcacctgggacttgctgtgcaccccgcgctattctctggttttcagaggatgaccacgaggcttgatgtgtggccagaccctcttgggactcctcggcgcggccggtgcaagcccgccctggtgtccagcagcccccacgccctgcacagggagctcagggcttcctggcctccgtttcccagcggactcgcctgcggtgtggttaggcggctggagggaggtggaggaacggcattccaggtgggaggctgcaggagtgtgggttgcaggggcgcaggggtagacccagaggggttcacggtggggggcatgggaaggtggaaaggggctgcggaccgagccgcgacacgaatgccggtggaccctgcagctgaccgcccacgggtgaggctggaagtcagttaacattttactgggtttgcttctgccctttgcatgtggaatgggtgtgccccaccgctgcccgtcccaccccaaccctgaacatcaggcttcccgtggggcccagccacggaacattccaggcctggagcggccatctcatttgcatgccgcaaggttgtggctcaggcggcttctcctgggggcctggtggtcccaggcagggggccgggctggggactgctccgccgaaccacgtcccagatccaggccacaaaggcggacacctgcgtgtacacgtcgggggtcttggggtcgccgcaccagaggcccgagaaggaaacgaggccgtgagcccggttcctgcacaccaggggccctccggagtcggcctggagtgaaaggagaggtgaggtcagggcctctgggagctgctgcaggcacatctcaccacggccctccctgcctcagaaccctctgtggctccctactgctctccaaggaaaaagtaaattcatttctcccctccaggccctgaggacccagcccccacccacttctctgccctccccgctgagcctcctcagtgctccacggcctttgtatagcctggagacctgttcctgccctgcgctggatgctgcctgtgtgaacattcgagtctgcagtgttttgggcagtgcacaacctacacagctgtacgcggcagccctctactaacaggtctctctgccttgcgtgtgtttcctcagatcttctaaggattccttcaagtctcagctcaaaggtgctctccttggagagggctccccgtatactcaccctaaaatccctcatcctaccctcctgccatctagaatccgctctgataccatcaactggatactaatagtgtagcagttttacagatggagaaaaagaggcccagagaaatcaagtgacttttccaaggtcacgcatcgggaaagtggacagtctcatttctcctggactcgggctgctgggctaagtgtgtgtcctgaaccaagtcgctctcttgcctgcggtaaaagaccctccagggccagtgtctcccttggcacctggggattcgtttatctggcaaggttttaggagtgggagctgcttcctctcaatctgttactaccctctactgaatactgcttgtataaatacacaagtgcttggctctttgtgcagtgcgcaacctgcacagctgaacatggcagccctgcatgacccttgccaactccctgccttccctgggcctcagcttctccgtctggtccaacatcaatgggactcagttcccaaggcccttcctggccctgaccctctctgtgggccttggtttccccacacagtaagtgggtggagcagggaggggatcttaccgagcagaagccccgtctgtggctgtccccactgcgggtgcagagcatggtaagtgtcaggtggcccttccaggagctgttgcagacgtccgggtccagcactcggaccttggcctccatcagtccaggcggcagctcctcaaagtcagacacgaagccccagccagccacccggcaccgtgtccccgctgtggggggcctggcccttctccctggcggcctcagcagccccactgcagggcccaggacagcagagccgttcagctgcagggagagcatgagttcaggccactgggctccctccccacccccgctcctgcctcagtttatccatgggacccctggtcctgcccttgtgaagcaaaatcaatggcggccaccatgaggccgggtcaggaggccccgttccttctgccaacacaggcccctacccctcaggcctccagggtcaccgt[137 bp omitted]ctgcctcagcctcccaagcagctgggattacaggcgtgcaccaccacacctggctaattttggtattttagtagagacggggtttcaccctgttggccaggctgttctcaaactcctgacctcaggtgatccacccacctcagcctcccaaagtgctgggattacagagtgagccgccgcgcccagcctcaaagagtctttcaaactccatctccttccttactctaagccctcccacggctcccgattgccctcaagacaaaacctctttgctcaccagccagggcctctgagggctctccagcctcagcctcccctttggccaggcaggatgaatttacagctactccctgggcctgccacacacctcccctcacaccagacccccagcctgaaacacttttcctattcagccatctcagcatggatgccacctcttccaggaagtcttcccagactcccaggctggcacgtgagtcttctctgggctccctgcagcctgttgaggccggtttacccagtgaagactgagtgacaccccgggctctgtgtggcccagcaccgggcctctggccctggccctggcaattggcacacagctgatgctcagttaatgggcctgggaaggacggctccaatccctgtctctggttctctgatttgtgcgtcttgggttcattcctgacattcttgatgtctcgctcagcctcagtttccccatctgtgcgatggcctctgggtgaaccagcgctggttccaggcttcagggtttcacagatgagaaaaattcacccaaaagctttggctactggcacttgctcctcctccttttttttttgtttttttcagagtcttgctctgttgtccaggctggaatgcagtggcgcaatctcggctcacggcaacctccgcctcccgggttcaagcgattctcctgcctcagcctctggaatttaattttgggatgctgggtagaagcgtcagggaaggggtcgtccctcgagcaggagggggccaggcgggtctgcatggatgcaccacgtgtgggaggagcagcttcccacccggaggactccacccagggacttttttttttttttcagatggagtctcactctgtcacccaggctggagtgcagtggcacgatctcggctcacggcaacctctgcctcccaggttcaagtgattctcctgcctcagcctcccgagtagctgggatgactggcacccaccaccaggctcagctaatttttttatttttagtagagatggggtttcaccacgttggccagtctggtttcaaactcctgacctcaaatgatctacccgcctcggcctcccaaagtgctggggttacaggtgtgagccaccacgcccggccccacacagggactttaagcgtctcctccacacagggcaggggcccgagaggcacattcattccatttcagcataaactttgagcgcctgctgtgtgccataaatggccataaaggtgataaaaaatccctgcccgttaggttcagaggaagcgggaatgaggaagcgggtggtccaggggttagcaggtgacaagcaggtgacgacggggccggaagggtggtccaggggttagcaggtgacgacggtgctagaagggtggtccaggggttagcaggtgacgacggggctggaagggtggtccacaggttagcaggtgacgacggggtggtccaggggttagcaggagatgacggggccggaagggtggtccaggggttagcaggtgatgacggggctggaacagggttgcagggagggggtatgtggtccagggcggcctcctgggaaggtaacatttgagcaaagacttgacaggcgtgaggggaaaggctcgcggtgtctggggaactggtgcactgggtacagctggtgcagagctcggagcggagactgtgctggggatgggatggcccatccgggaggtctgctggcctcgagtcagaaaggtgacaggcatggattagcagggcctgtgggcaccaggaggatttgtcctgcaggaggtgggagccactggggggtccagggcacaggaggaatgggacctgacgtccaactgtctttaaaacctaagtcaggccaggcgcagcagctcaggtttgtaatcccagcactttgcggggctgaggcaggaggattgcctgagtccaggaggtcaagaccagcctgggcaacatggtgaaaccccgtctctactaaaaatataaaaattcgcctggcgcagtggtacacgcccgtgatcccgacactttgggagaccaaggtgggcggatcacttgaggaccggagttaagaccagcctggccaacatggtgaaatcccatctctactaaaaatacaaaaattagccaggtgtggtggtgggtgcctgtgatcccagctactcgggaggccgaggcaggagaatcgcttgaacccgggagatggaggttgcagtgagccctgactgtgccactttactccagcccaggtgccaaagtgagactccgtctcaaaaaataggccaggattgggaggcagaggtgggcggatcacgaggtcaagagatcgagaccatcctggcaaacatggtgaaaccccatctctactaaaaatacaaaaattagccgggcgtggtggcgggcgcctgtaatcccagctactcggggggctgaggcaggagaatcgcttgaacctgggaggcagaggctgcagtgagccgagatcgtgctactgcactccagcctggggacacagggagatactgtctgaaaaaaaaaaaaatagcccagggctgcttctcctggaaaacactaaacggcggatgacgtcggtgcagtggggcggccctgggatggggaacggcgctggcttcccccgaggcttcggcactggcttccgggctggggccgcggagctcacagaggcaagacagaggataaggagtagacgcctgtcaccaagctgggccgcctggtcaaggacataaagatcatgtccctggaggagatctgtctcttctccctgcccatcaaggaatctgagatcattgaccttttcctgagggcctctctccaggacgaggttttggagattatgccggtgcagaagcagatccgcaccggccagcgcaccaggttcgaggcgtctgttcccaccggggactacaatggccacgtcggtctgggtgttgagtgctccaaggaggtagccactgccatcatcggggccgtcatcctggccaagctctccgttgtccccatgcacagaggctactgggggaacaagatcggcaagccctacaccgtccctggcaaggtgacaggccgctgcggctctgcgctggtgtgcctgatccccgtgtccggggcgctggcatcgtctgggcgcctgtgctcaagaagctgctcatgatggctggtatcggtgactgctacaccttagccaggggctgcactgccaccctgggccactttgccaaggccgcctctgatatcctctctaagacctacagctgcctgacccctgacctctgtattccccaagtctctctttcaggtattcactggccatcttgtgaagactcacaccagagtctccgtgcagacgcccggctccagctgtggttacaacatagggttttatacacgaaaaataaagtgaattaagcctggaaaaaaaaaatggccaggcacgatggctcacgcctgtaatcccaacactttgggaggctgaggtgggtggatcactgggtcaggagttcgagaccagcctggccaacatagtgaaaccccatctctactaaaaacacaaaaaactagccaggtctggtggcgagtgcctgtaatcccagctacttgggtggctgaggcaggagaatcacttgagcctgggaggcggaggttacagtgagccgagatggcgccattgcactccagcccccgtgacagttcgagactctgactcaaaaaaaaaaaaaaagaaaagaaaagaaaagtaggccgggctcggtggctcacgcttgtaatcccagccctttgggaggccgaggcaggtggatcatttgaagtcaggagcttgagaccagcctggccaacatggtgaaaccccgtctctactaaaatacaaaaattagatgggcttggtggcgcgcacctgtaatcccatgtacttgagaggctgaggcaggagaatcacttgaacccgggaggctgaggttgcagtgagccgagattgcgccattgccctccagcccgagcgacagagcgagagactgtctcaaaaactaaacatacgtcagatccacccccggggctcacccgcagcaggcagatgtcgttggcgtgggtcatggggtggtagtcggggtgtgtggtgagagcatcgatgccaaacacctgctgggtgggctccgcagtactcaggacgtgggcgcccagcaccaccaggccagtgcggaggtctctgcagggaggaggtggtgggtgagacgggggtgagggctgccc[137 bp omitted]acatggagaaaccccgtctctactaaaaatacaaaattagccaggtgtggtggcacatgcctgtcatcccagctactcgggaggctgaggcaggagaattgcttgagcctgggaggcggaggttgcagtgagctgagattgcaccattgcactccagcctgagcgacagaacaagactccgtctcaaaaaaacaaaaaaaaaacaattacttttgcatcaacttaatattcttttccttttttctttttttttttttttgagacagagtctcactctgtcccctaggctagagtgcaatcgaggcttactgcaacctctgcctcctgggttccagtgattctcctgcctcagccctccaagcagctaagactacaggcgtgcgccaccactcccagctaatttttgtattttcagtagagacagggtttc[142 bp omitted]tattatttttcctacctccaatatagaattaactgcaatagttgtggtattaatttgaatcattattataaaaacatatttagaatgaagataatacttattatatttattataagttctatttcaattataatattaactacagtaatttcaatattctcctttttttatttctttaatttttttttttgagacggagtctcgctctgtcacccaggcaagattgcagtggtgcaatcttggctctctgcaagctccacctcccgggttcacgccattctcctgcctcagcctcctgaatagctgggactacaggcgcccgccaccatatccggctaattttttgtatttttttttagtagagacagggtttcaccgtgttagccaggacagtctcgatctcctgacctcgtgatccgcctgcctcggcctcccaaagtgccgggattacaggcgtgagccaccgcacccggccttttttttttttttttttttgagacaaggtctcactctgtcacccaggccgcagtggtgtgatcacagctcactgcagcctcgacctcccaggctcaagcgatcctcccacagcagcctttcaagtagctgggaccacagaagcacagctccggtgcggaggactctgcggggaggagggggtgggtgagatgggggtgacggctgcccgtctgggcctcagtccactcatctatgaaatggaggcccagtaatccatttaatgctcacgccggccccgtgataatattaggttggtgcaaaagtaattgcacgaaaaaaattaaatggcaaaaaccacaattaacttttttttttccgacagaatctcactctttcccctaggctggagtgcagtggtgccatctcggctcactgccacctccacctcctgggttcaagtgattctcctacctcagcctcccgagt[131 bp omitted]tcccgggttcacgccattctcctgcctcagcctcctgggtagctgggactacaggcgcctgccacc[175 bp omitted]ttcaccatgttggccaggctggtctcatactcctgacctcaaacaatccaccgtgtcccaacgtgagggggactgcaggctggcgggggagctggggacactgcagcccaggaccaacctatcccgtgcctggtgggggctcctgcaggaggggacccacccaccctggccccaatatacattttaatagttattataacaatatgtttaaaacgaggcagggcatggcggctcacacctgcaatcccagcactttgggaggcagaggcgggtggatcatttgaagtcaggagttcgagaccagcctggccaacatggtgaaatccagtctctactaaaaatgcaaaaattagccaggtgtggtggtgggcgcctgtgatcccagctactcgggaagctgaggcaggagaatcgcttgagcccgggaggtggaggttgcagtgagccgagattgcaccgttgcactccagcctggggaaccgagactgcctcaaaaaaaaaaaagaacatagtgacagttacagtaacagaatatgtacttgttgcgcctgttgcttcttctgtgcttcttttgcctccctgccttatcctcctgttttccctttgttgccctttaaatccagcccctgctgagactccccctcctgcaggagccacggcgcccccagctcccccaccagcctggagtccccctcatgtcgggatacggtgtccagaaagaaggggcccgacaggtgagctcacctgtggctgaagcagtgggcggccgagaccacccagcgggctcgcagcaggaagcctccgcagtgatgttggcccccgaagcgcacggatgccatgtagggcctggagtggggggtcacctcgtggcccccgatgatctgggccccccaggagcctgctggagggacggcctgagtcagggacgaggcgggaggaacggatgacggggctggggtcagggcagggggagaagtagcggccaagacagagacagggggtgagattagagacggagagacccagagagctggagacagagcccagacaagccccccagatgcgctgggaggggctcccgagcccgggagatccagggctgggctgggcagagaccccggccggatttccatccatttccagcagaggcagccacgggggctcggcagatggagcaggtggagctctccccagggttctcccgggactgggggttcccgggtgtggcccccgtacggggacttggcgggggcctgggtggggatcccggggggctcctcaccggggggcttcacgggcagcatcagggcggtggccacagtcagcagaggacgtccccagcccctcaacccgagccccatggcagacgcaggctggcgtctccccgcagaggtcttcgggccgtggctcccaccctcagccaacggccggaaagggggagcctggctgtggcctgtggtcgggaggccccaccagcaacgcctggagcccaggcgggcgtttctgagaaatcgatggtctcaggtggtggctggtaataatcatgttgataataatcattgtcccctagtccggaaacagggagaggaggagacagctctggggctgcaagtgacctcgggaaggcaattgacccttctgtgcctcagtttacccagcctccacgtggcccagcatgtgtggggagctttccgaggaaccgaggtcacagcggcactcgagacccgcagctcgcctccggcccccaccccgcaaaccccagtcttcccatctccaaacccagggccgacctcagggctgtggggacagcgaggaaggccggtctcctgggaagctctgatgatttctgcctttattttattttatttttataggtggggttttgctatgttgcccaggctggtctcgaactcctgggctccagcgatcctccctcctcggccttccaaagtgctgagatcacagaagacagccactgcacctggcagatttctgcctttattcagcagttattgagtgcctagtgtataccagacctcatgctaggaggtgaggatgaggcagtgaccgcaccccagcctgtagcactgacgttctgtgggatccggagtccagtgggacatggctgtacatgggggtcttcaccttttttttcttttctttttttttttgagatggagtcttgctcttgttgcccaggctagagtggaatggcaccatctcggctcaccgcaacctctacctcccgggttcgagtgattctcgttcctcagcctcccgagtaactggaactacaggcgcccgccaccaca[175 bp omitted]aatcttgctcttgttgcccaggctagagtgcagtggcgcgatcttggctcaccgcaacctctgtctcctgagttcaagggattctccttcctcagcctcctgagtaactgggattacaggtgcccaccaccacgccccgctaaatttgtgtgtttagtagagacggagtttctccatgttggtcaggctggtctcgaactcccgacctcaggtgatccacctgcctcagcctcccaaagtgctgggatgacaggcctgagccaccgcgcccagcccggcaggtcttcacctttcagtgggagcgttcttagtggcaaagttcaggtcgtaaattgcagctcacacagccgggtgatggcgttcacggcagtggctagcagtggggtgctcgtcagcgcttaataatgaacaggctggggccgggtgcagtggctcacgcctataatcctagcactttgggaggccgaggcaggtggatcacctgaggtcaggagttcaagaccagcctggccaacatagtgaaaccccgtctctacttaaagtaccaaaattagtcaggcgtggtggcaggtgcctgtaatcccagctacttgggaggctgaggcaggagaatcgcttgaaccgggaggtggaggtggcagtgagccaagattgcaccattgcactccagcctgggtgacagagcgagacaccatctcaaaaaaaaaaaaaaaaaaaaagtcatcattgaacgctccagacctgtgttttaccaaatgtaaagtgttctcaataaagaatgaagtgaaatgaagcaacaggaaatgcgtggaaaggaaggtatgaaaaggccccacaacgaactcgggctctgcgagatgcgggcggcctctggaagctaaaaaacggcaggaaacgaattttctcctggagcctccgggaaaagccagccctaccgatgccctgacgttagcccagaagggcctgcaggggcttctgacctccagcactgccagagaataaattggtgccatttcgtttattattattattattatattttcttgagatggagtctcgctctttcgcctaggccagactgcagtggtgcgatctcggctcactgcaagctccgcctcctgggttcatgccattctccttcctcagcctcccaagtagctgggactacaggtgcccgccaccacgcccggctgatattttgtatttttagtagagatggggtttcaccacgttagccaggatggtctcaatctcctgacctcgtgatctgcctgcctcagcctttcaaagtgctgggattacaggtgtgagccaccgcgcccagcctcatttattatgtatatatttattttgagacagggagacagggtcttgctctgccgcccacgctggagtgcagcagtgcaatcaaagctcactgcagcctcgacctcctaggctcaagccatcctcccacctcagcctcccaagtagctgggaccacaggcacctgccaccaccaggcccggctcattatttcattttttgtggagacggggttttgccatgttgcccaggctggtcttgaactcctggcctcgagcaatcctccagcctcggcttcccggagtgctgggattacaggtgtgagccaccatgtctggcccaagttggtatcattttaaaccactacgtttctgggaattcgttacagcagctgcaggaaagattttgggaaatggaaagctgtttccagggcctggggacaggtgggaccccagctcagggtccgtgtacttggggaccatttcctgctctgctgtggtctactggaccgtctggcatcgctgtgaccgcatgggccgtgctccatcaatattgtttttttgtgtgtgggtgtttttttttttttttttagatggagtctcgatctgtcgccaggctggagtgcagtggcgtgatctcagctcactgcaacctcagtgtcccgggttcaagcgattctcctgcctcagcctccccagtagctgggactacaggcgtctgcccccacgcccggccaattttttgtatttttagtggagatggggtttcaccatgttggccaggctggtcttgaactcctgacctcgtgatccgcccgccttggcctccgaaaatgctgggattacaggcatgagccactgcgcccggccctgtttttatcttttagagacagggtctccttctgtcgcccaggctggagtgcagtggtttgatctcggctcactgcatcctctgcctcctgagttcaagcgatcctactgccttagcctcccaagtaggtgggattacaggtgcctgccaccacgcccggctaatttttgtgtttttttgttttgttttgttttatttgtttggtagagatgggtttt[141 bp omitted]ctggtctccacggtcgtcgcgtcagcacgagtgggtcccctggacttgctcctacctcccctgctgccctccgtcgcggagcactgaggcagagacctggaaaacgtccccagctccacgggcgttagaaggagaattgcccgaagctgcaggcgtgtggaactttgttccctcacgatgctgtccctgtcccggtcgctgatggggacacagtagggagagggtaagcgccttagccctgccacacagtgaggagccagggggccggggctgctgcctcagaggagctcccactgcctctcgggaccgattctatccagagctgggccatttccttcccttttggtgaacagttgtgaaataaacaaccgtcctccagcgtctcagaaaaccgagctcctggcagccctgaggagggggctgagtgggggtcactgttcccacttcccaaactgaggcccagagaggggagccgatttgtctggggccacacagcacagggtcttgacccatgagccgctggactgcgattctcctggagggtctctccatggcagatctgagcggctcttcaggagctcagacaccagccactgcagggagtcaacagcaatggtgacaacagcttcctttattgtatttaattttacatttttattttatttattttgtttttttgagacggagtctcgctctgtcacccaggctgcagtgcagtggcaccatctcagctcactgcaagctctgcctcccgggttcaagtgattctcctgtctcagcctcccgagtagctgggattacaggcgcccaccaccacgcccagctaattttttgtatttttagtagagatggggtttcaccatgttggccaggctggtcttgaacttctgatggcaggtgatccacccgcctgggcctcccaaagtgatgggatgacaggcgtgagccaccgcgcccggcccctcccctgcgaaaaattgtttttcaagacgagatgttgcctggtggctgagactgcaatcacagctcactgcagcctctgcctcctggctccgccttccctgtagctgggaccacaggctcacaaaaccaccagggtaattaaaaaaaaaaaaaaagctag[139 bp omitted]gtggcgggcgtctgtagtcccagctactcgggaggc[136 bp omitted]tctcactatgccgcccaggctggcctcaaactgacctcgactgatcctcccaccttggcttcccaaagtgctggtgtaataggcatgagccactgagcctggcctcactttatttttatttttttgagacagatgctttgtcacccaggctggagtacagtggtgtgatctctgcttactgcaacctctgcctcccaggttgaagcgattctcctacctcagcctcccaagtaggtgggactacaggtgtgtgccaccacacctggctaatttgttttgtatttttagtacggacaggatt[133 bp omitted]tatccacaggacattgcttcttcttttttttttttttttttgttgttgttgttgagagggagtctcgctctgtcacccacgctggagagcagtggcgcgatcttggctctcagcaaccttttcctcctgagttcaagagattctcctacctcagtctcccaggtagctgggattacaggcatgcgccaccacgcccagctaattttttttttttttttgagatggagtttcgctcttgttgcccaggctggagtgcagtggtatgatctcagctcactgcaaactctgcctctcgggttcaagcgattctcctgcctcagcctcctgagtggctggaattacaggcgcccaccaccacccccagctaattttgtatttttagtagagatggggtttcgccatgttggtcaggctggtcttgaactcccaacctcaggtgatctgcctgccttggcctctcaaagtgctaggattacaggcgttgccaacgcgcctgatctttttttgtatttttagcagagacaggttttgccctgttagccaggctgctctcgaactcctgacctcagaggatccacccgcctcagcctcccagaatgttaggattacaggcgtgagtccccgtgcccggacctgcttcctatttcttgaaatggaagatagctgccttaagaatacacattgcactggctggacgcagtggcttgcgcctgtaatcccagcactttgggagactgaggcaggcggatcccctgaggtcaagagttccagaccagcctggctaacatggcaaaaccccatctctactaaaaatacaaaacttagctgggtgcggtggtgtgtgcctgtaatcccagctactcgggaggctgaggcaggaggatcacttgaacctgggaggaggaggttacagtgagccaagattgcaccgttgcactccagcctgggcgacagagtgagactccatctcaaaaaaaaaaaaaaaaaaaaaaagaatacacatagcacaacccaacactacctgccttccagccagactggagagggctggcttggccgctactgggggtccctgagctgtccaaaggccctgctccccggagctctctggcctcagttttcccatctagggaatgggttgccctggggcaatgccgagagtgctgatgagaattcagcaaggttggctgggcacagtggctcacgcctgtaatcccaggactttgggaagttgaggcaggcgggtcacctggggtcaggagttcgagaccagcctggccaacatggtgaaaccccgtctctactaaaaatgcaaaaattagctgggggtggtggcgggcacctgtaattccagctacccggaaggctgaggcaggagaactgtttgaacccaggagatgcaggttgcagtgagctgagatcgcgccactgcactccagcctgggtgacaagaacgagactccgttggaaaaaaaaaaaaacagcaaggtactggatgcggcatgctggtggggactggggccctggcgccccttgtaaagcgcctgtttgcccatccgtaagctggatcctgccccgtccttcccatggaagccatcacagtcagagaagagggtagaagacaggaaaccatccattcattcactcaactcattccgtgagcatttattgagcacctactgtgtacagacagtgttgtgggccttggggactcagcagtgaagaagacaggcaagttcctgcccttgtggggctgacattcagcagagaggcaggaaggaaacgctgaacacaacatgtaaatgacattgtctgtcagaagaatt[137 bp omitted]acacggtgaaacctcgtctctactaaaaatacaaaaattagccaggcatgatggtgggcacctgtaatcccagctactcaggaggctaaggtggaaggatggcttgaacccaggaggtggaggttgcagtgagctgaggttgcgccattgccctccagcctgggcaacagagcaagactctgtctcaaaaaaaaaaaattagccacgtgtggtggtgcacacctgtagtcccagatactcaggaggctgaggtgggaggattacctgatgggggaggtcgaggctgcagtgagccaagatcacatcactgcactccagcctgggtggcagagtgagaccctatcttattcaaaaaaataaaaacaacaagggtaccgagggcacccagtgacaatggggaagctggggaagttctcccagaggaacacacaaggcgtctaacagcaggtgtctggatggctgaagcccaagctggttgtggggcaaggagaggtgagcagggaagagacaggattgtctgggctcagctttgccttgtggggctgcagggcactggggaaccatagatggtgtttgagctggggcaggccagggcatatttctctggtgaaagagtggagtagggagaggaggtggggagacccggaggcgacatggctcagggttggggtgggggccataaggcctcagctaaagtcatggctggggagaggcgaggggggtctctgactcagggacaggggaggagtgaggttttgggacccacctatagcttccggtcgtccaaggctccagagggtggccagatctgcaaggagtggtggggcgtgctgggcggagccccggggtagagctctacggaagtaggaagggcaggggcgccctcagggaaacctcactcctcccctgtccctgagtccaggaaggggtcaggccaacgtcgctctggaagcctggaggcggggccgaggtgcaggggcggggccgacattgcctgggaggcggggctgaggtgcaggggcggggcctacattgcctgggaggcggggctgaggttcaggggcggggccgacattgcctgggaggcgaggccgaggcacagggggcggggccaatgtgcaggggcggggccgacattgcctgggatgcagggaggtggggccgatgtcgggggcggggccatggtgcagggggcggggtcggggcggggccgagatggcctaggctgctgggaggcgggactagggtgcagggtgcgaggctagcggggtgatgcgggggccgagattgcccaggaggcgggtccgaggttcagggggcggggctagggcgcagggggcggggccgacattgcttcggaagctgggagtggggaccgaggtgcaggaggcagagcctcagtgcagtgactgctccccacaggacgcggatgggcgctgcagtgcctgtgggtgggtgagcgcagtgaggcggtggaagtgagggtgtgaagggcaactcgaggcagcttctctccggtccactacacaccccaccttgtcccacctccacacctttgccaggccgttccggccacctggaacgtctccctccaccgtttgcccggcccatttccccggttcaagtggcatcacctccaggcctgtgtgtgctggagtcgggaggtgtgggcggcgcgagtttttcgtgcagggccttgagagtggcaggaggactttagcttttgctcggagggaggtgtgagtcctggaggtttagagctggggcggtgggagaaatgatcccagcagtcccttaccctccccacggcctcctcacttcctcctatttttacacaaaatgcctccaccacccttcaaaccctgaatcttttattttattttatttttgagatagggtctggctctgtcacccaggctggagtgcagtggtgtcttcacagctcaccgtagcctcgatctcctgggtccaactgatcctcctacctcagcctgtgagtaactggaactacagatgcatgatacctcac[174 bp omitted]gtgtcaggagcctgtagtcccagctactcgggaggctgagacaggagaatggcgtgaacctgggaggtggaaattgcagtgagccgagatcaccccactgcactccagcctgggcgacagagtgagactctgtctcaaaaagaaaaattacatttaaaaatgtatatatggctaatgactgctgtaccgaacaaaccagtccccaaaagcaaatgaaataacagctgccaccaagtaccacggtcacacctaaaaaccaattaacacctcgacagctcctcacgcaggttccgtttactcgggagtaggagccggccacccgatgcagggtcactatgaccccccaagcccgtgcctcgccctgtctcttcttcctccttataattaaaatcttgaaggaccccgatggcagcctgtcccaccgccctgcctgggtctggcccctgcagcttgtgatgcttctcagacccattcccagccctccggggagtcacagaggggtgagatcagacagaggtttgaatccgggggtggcctttccttggatggagcagtatttaaaaaaaaaattgggccaggtgcggtggctcatgcctgtaatccc[131 bp omitted]aaaaaaaaaaaaaatttgtagagatggggtctttctgtgttgcccagactggtctcaaactcctgggctcaagtgatcctcccttctcagcctcccaaagtgctgggattacaggtgtgagccactgtgtctggccctgaatcatttattttattttgagccaggttctggctctgttgcccaggctggagtgcagtggcatgatcacggctcactgtagcctcaacctcccaggctcatgcgatcctcccaccttagcctcccaagtaactgggaccacaggcacacaccaccgtgcccagctaatttttattttttattttttattttttttgagatggagtttcgctcttgttgcccaggctggagtgcaattgtgcgatctcggcccactgcaacctccgccttccaggttcaagtgattctcctgcctcagcctctggagtagctgggattacaggcatgcaccaccacgcccgcctaattttgtatttttagtagagacggggtttctccatg[132 bp omitted]taggtagcccagggtcttcacctcctggattcaagtgatcctcctgcttcagtctcctgaagtgttgggattacatgtaacagtcacttcattcaccctgaatcatttatgtaggggacaaaaatcaccgtctctccaaggacagaacttcttttttgttttgttttgttttgttttgttgagatggagtcttgttctgtcacccaggctggagtgcagtggcgcgatctctgctcactgcaacttctgcctcccgggttccagccattctcctgcctcagcctccccagtagctgggattacaggcgcgcaccaccatgcccagctaagttttgtatttttagtagagaaggagtttcactggccgagcgtggtggctcacacctgtaatcccagctactagggaggctgaggcaggagaattgcttgaacctggtagacggaggttgcagtgagccgagatcgcgccattgcactccagcctgggcaacaagagcgaaactccgtccaccccagccaaaaaaagaagtggttttgcca[139 bp omitted]cccaaagtgctgggattataggcgtgagccacggcgcctggccgcaaaaatggaacttctgcatcacaggtgactaacggtgccaggcacacagtaggtgttcaataaatcactttggactaaaagaacacagaggccaaggggaagtgaagaaacgactcacaggtcagttttattgggtgcctagtgcaggggtcagtacactacggccctcggatcagctctggccctctgcctgtttttgtaaataaagttttattgggtgcctagtgcaggggtcagtacactacggccctgggataagctctggcccactgcctgtttttgtaaataaagttttatgggcacagagccatgcccatggttttacatattgtctctggctactttcactctgcgatggcagagcagagtcattgccgcagagactgtggcctgcaatgctgaaaatatttactctctggccctttacagaaaaagtttgccaaaccctgagctagtgtgtgctgggccctgtgccaagccctttgtgtgtgctcactcagttaaccctcccacagccttaagggtgggggcaggggggtgggggggaataaggctccgagaggttgagaaacagacccagggtcacacagcttggagatgggtgagctgggaatcagacagacccgggacccctgatattctttaggatcttagctttgttaacctttgctaatttatcttattgtcttaaatgctaaaatgaatacacattcattgtaaaaagggaggaataaagaaaaggtgttgacggccttcttcagcctggggtacatcctgccgtatctttctccacagctcatccggggctactttcctttaaatctacagccattcagcaaacatcggcagaggagaaccgttttataagaaaactaagaagtttggaagaatctttccttcctgcccaccctggacccccatgagtaggtgtgctggggctggtctgcagtgttctcacgggaaaccaggaagctgggcccaaggcctacatgttggggaagacaggtcctgcctgtctcctgctgtggctccccagtgctctgaggacaaagcctgagctctccctgattctccaccgtccctctcactcactctggtcgtctggtcgctgggcctttagtgagtgtgccatgggggccctggggccgattaaattccagccccggggaccaggctcagctcccagccagggcacagacagatcagcacctgcggttgtctccaccccaacccccggcctttgcaggcacagcgccctccaccagatactccggcaaaggaggcctggggaccctgcgagcggggccgggggtgcagggagctgtcagctcctcgcagcggcctccccaggacccccctatcccctcgctcgccctgaaatgtgtgtccctctcggcgtctgggctctcgagaaaggcctttgcttgtctgacttcgcgagggtcccggctctggcccaggagctggggaggggcgggacttggtgacagccgggtcccagcaccgcgcccagacctaggcccttctcaggggtgccccggggcggggcgcgcggggcggggggcggcggcggcgcagccggcaggaggcgcagcgcccgctcgcagcgcggggaggtgggaggggagcggggcggggagcggggcgggcgggagggagaggggagcgcgccggagacgcgcgcgcccagcccaccccccgcgcccgccgccgcccggacaataaacagcagctttgcgcggggcgatgcccgagccggtgccgccgcccccgcgccgcgcagccccggccgccaggccttagcccgccccggcccccgccaggccgcgtccccctcccctcccctcccccgcgcgccacccgcgcccgcccccgcccggcaccgcggacccacccggacctcggcggggagatggagtgagtaggcgcgctcgggccgcggggctgggggcccggagctccgggagccggggaggggggaggccccctctctcgcgccccattgggggcgtcgctgcccccgcgaggagcaggaggcggcgcggggctgctggggccgcagcgcagccgggaagagactcgggctgggccgcgcctgccgggaggcctccccgctcccggaccccggctgcccacccaccggcgcgtggggacccgggcagcggcggctcgggccagtccaggacgcggggagggggaggctcgcgtctccgcccgcgccccgcccgcgtctccagggcgagcctcggctctcggccacctgtgggtggccccggggagatggagcgacccctccccagattgcaccggtccggcctcgcgctcacgcacccttcccccgccccagtctgagcgcacggctcctggcgccctggacgcgcgcgcgggccggtgccccccacccccgcccttcccaagggcctccaggggtgtcctgagccccccgccactgcgcaggtcccgagttaccgctggagggagaggggctgccctcggcttcccgggtctctggggtgtgtgagaagggagaggaaccggcgttttccagcggggcgcctgggtgggataccctctcggggaagtgtctcggagctggggctccactggtgtagctacaggagtgggctggccctgggctgggatccctggacccccgcatggctgcgcctgtgtgtgtggggggggggtggccagtggaggcaccgagcgagggcgcgtggtcatttcggacaccggtcccctcctcccggtgctcgggtgcccctctgcccctcactcccacaggtgggcactgcacgggcaggggtcaggaggctcctcctggggtcacccacctgcccacttcaggacaggggagccagctgccctgctgaggcccgggtccccaccccagcccgaggaccgaagaccggatctggaggccgcctgtggccccctgcccttcccactgggcgtgttttctaagccgccaactttccccggggattcacccgtgacccgccacgcccgcggctgggtgggggccgctgcctccctccctccctgggaaagcgagacacccagtgtcctctgcttttgaaaacccagacaaaggcctgacccctctccccgtcaccccgccccgggagctcagccaggggctcaggggagccagggcccagacttgcctgctccacacccccaccccccagccttgtttatctgccctgctcgccaggccccggaggagcctctgggcctctgacagccaggcctgggcagggtgtggctgtggggagggggctgcctaggaggacgacggagatctccctcccagaggaggggtgtcagcgaacactccgggtcgggcccattgtttccttcctgccaccccttcctttcccacgggggatactgaggcccagagaggagctgctgccccccccccaccccccctccatcacacagcacctggggccggggggcctcggtgcctcctgctctgctccacggtttctccgtcctgggtcagagggtggcccacaggtcccccattgggtcatcattgcttttggggatgcagacatgggacaggcacccagtgttaaccggctgctgtgagccgccattcgaggacgactctctccccggttcccgggctgacaatgggtggggacaggcccatctggtgccgcccggccttggacacctgccccctcgttcttctccccggcgggcttcaggcacgaaggccccgtccgctagaacgtgatcgcttgcctcctcccgtttccacagattttccagtcgaagacacgggagctggctgtggtttgtggtggtgcccgtctcgctggaaagtttcacaaatgaatttaagaatttaaagaattttaaatgtcattcaagaacaggttattttttgttaatgtgaggatttaaggagaactagcgggttgctaaccacagggccgatgctgccaaggtgaggagaacgtccaggaaggagctggggagaatctctgcttcggagagaatctctgtgctctgggagggtttgtgtggcccctgcgtgacacatggtctggctggtaaaataaagatattttggcctggagcagccattctccagcacccacagccctgtcctgggtacaggcaaggctcaaacccccgggatagggaggagaacagacttgggcctggacagatggtcaagaccggcccagactcctccctgctcgcagacctggaaattttcaataggaaagtctccgttgggtgctaactgggtccttaacgctccttcacacttgctaatccccctttttaatgagaggcagagcctgttaaaaggcaacagtacctagtgataattgaatttaataacaagcttttacttccgttgtatctgtttcttcctccatgtttccgctgtcttgtttgtggcggtggcttctggtttgcccagtgttgatcacaatataatgtttctttctaaaacaaggcgatttgatttacactggagtggttttgaaggcaaggaatagacagatactgtccaggaggtggcggaacatgggaaggtggtttctttcttttttccatgttgcccaggccagtctcgaactcctgggctcaagcgacttccctgcctcagcctcccaagtagctgggacgacagcattgcatgggaaggtggtttgagaagtgcaggcgtaatttattcactcggcaaccattaagtgggtacctgccttttccacggccctgttttgagtgctctgtatgtgtgtgaattcctctgatgcttttttttttcttttggagacagagtatctctctgttgtccacactggagtgcagtgctgcgatctccactcactgcaacctccgcctcccgggttcaagcaattctcctacctcagcctcctgagtagctatgactacaggtgcccgccaccacgcccggctaatttttgtatttttagtagcgacagggtttcaccaggttgcccaggctggtcttgaactcctgacctcaggtgatccgcctgcctcggcctccccaaagtgttgggatgaaaggcgtgagccacgtgcctggctgacacttgccttttccatggccctgttccgaatgctttatgtgtgagaactcccttgacccttgatccttctttttttttttgagacagagtcttgctccatcacccaggcagtgcagtggtgtgatcccggctcactgcaacctctgcctcctgggttcaagcggttctcctgcctcagcctcccgagtagctgggactgcaggcgcccaccatcacgcccggctaattttttgtgtttttggtagagacagggtttcacagtgttagccaggatggtctcaatctcctgaccttgtgatccacctgccttggcctcccaaagtgctgggattacaggtgtgagccgccatgcctggtttttttttattggagacagagtctctctctgtcacccagactggagtgcagtggcgcgatctcggctcactgcaacctctgcctcctgggttcaagcgattctcctgcctcagcctcccgagtagctgggattacaggtgcctgccaccacgcccagctaatttttgtatttttagtagagacaaggtttcgccatgttgggcaggctggtctcaaactcctgacctcaggtgatccgcccagctgggcctcccaaaatgctggcattacaggtgtgaggcaccgtgcacggcccactcccttgatccttacagaagccctgcgagagagggaaactgaggtacagggtggtccagtggcacatgtaaggacacacagctgcagaggcatgggtggggggtttgctgctgggtgggccgagcatgctctctctaagccgccggggacaggggagggtttttggtacctgtgtctgggggttgtggtcttgtggggcgtggtggtctggatatcagacatcctggtgtcggctttcaatcctggtgtgtttattgagaaacacagacggtggccttgtcggtggtcttggctcctggggcatctgccctgcctctgtgcccatccacgccgttctgtgatttgggagaggagtgtggagagggggtcctgactccccgtcacaccttagcatgtcagtctcctccgggcctcactgttctcatctggcgagtggggatgtgactgccatcattaggggagataggggtagaggaagggcaggtgctttatgggcctggaccctctgagcaccacccagtgggggcatctctgcctctgcccattagccaggttcatccttaagggcctcagattttgaccctaggaaattggcttatgttctttttgtttgtttgtttgagacacagtctcgctgtcacccaggctggagcacagcggtgtgatctcggcttatagcaacctctgcctcctgggttcacgcgattctcatgcctcagcctcccaagccgctgggactacaggcatgcgccactgcgcctggctaattttttgtatatttttagtagagacggggtttcaccatgttggccaggctggtctcgaactcctggcctcaagtgatccgcctgcctcagcttcccaaagtgctgggattaca[135 bp omitted]tcctgggttcaagccattcccctgtctcagcctcccgagtagctgggactacaggtacccgccaccacacccagctaatttttttgtattttcagtagagatgcggttt[144 bp omitted]ccaggctggtcttgaacttctggcctaaagtgatccgcccacctcggcttcccaaagtgctgggattacacgcatgagccaccgcgcccagcctacgttctttttttctttcttttttttttttttttttcagatggagtctctctctgtcgcccaggctggagtgcagtggcgagatctcggctcactgcaagctctgcctcccaggttcatgccattctcctgcctcagcctcccgagtagctgggactacaggcgcccgccaccacg[183 bp omitted]agtgcagaggtgtgatcatagctcactgcagcctccacgccccgggctcacgggatcctccacccagcctcttgagtagctgggactacaggtgccaccaccacaccctgctaattattatgttttgttttgtttttgtagagacggggtctccctgtgttgcccaggccggtctcaaactcctgggctcaagcatcctcccacctcagcctcccaaagcgctgggagtacacacatgtgagccactgcacccagcctgatgttctttaaaagcatcatatgggccgggtgcagtggcttatgcctgtaatcccagttctttggaaggccgaggcaggaggatcacctcaggtcaggagttcgagaccagcctggccaacatagtgaaaccccatctctactaaaaatacaaaaattagccgggcgggcgtggtggcgggtgcctataatcccagctactcgggaggctgaggcaggagaatcgcttgaacctgggaggcggagctttcagtgagccgagattgcaccactgcactccagcctgggtgacagacagagcgagactccgtctcaaaaaaaaaaagcattatatcacctttttctgagtgtgggcccctgtttcctctcatcctttcttgatctaggaaacctgtcatttgtttattgaacaaataaatgctccctcctcaccatcctcgtgctgtgcgggatcagcagggtctggaaagctatgcagcatcttctctgaggtgtgagaaaggcttcctcatccagtccatcatgaaccttttctgagaaggatgtttcagggttcatccaggcaggcagaaggatgcaccttgtggaaggactggcatgtgcaaagggctagaggtgggaaagcattggaagaagagaatgctctttggtgtttgttcctgctaggccttgagtgccaggatggggagtcatggatagtgtgtgagcaggggaggagcagtggctgacctggtcatcaaaaaaggcgctggcagctgaggagtgagcccagggaggagcaagtcatggccaagccttgattgtggctgcaggggcagcatgcagagaaatggcagagccagagggggcaggaccccacgtctaggagggcaaacacaggattccagaactgcgtgtggtcagtgatgcccacagggacggggctccctggctggggagaagtagcctggtccctggatacatgagggggtggagggcgtcctctaggaggatggctgcgtggacgtcttggtgtctgaggagtgtaaaatcaggccagagtggctgtctcccgccccagggtttcaagcagaaattcagggacagtcagagccagtcaccaggacagagcctggactgggtgggaagaggg[146 bp omitted]acccccgtctctaccaaaaatacaaaaattagccaggcatggtggcaggtgcctgtaatcccagctactcgggaggctgaggcaggagaatcgcttgaacccaggaggaggttgcagtgagccgagattgcgccactgccctccagcctgggtgacagagcgagactctttctctcaaaaaaaaaaaaaaagaaagtttagattaggaccagagtgaggccagctgagtgggaggcgctgcatggtcaacagactggtggtgggacagggccaggcctgggagcccctcctgggtgggcagaggctgtgggcaatggaggcagagatgcgggaccctgaaggccggggagggacagaggcccagggttcttcagtaacccctgtcagggagcgagaagctgatgtcctcatcagtttgtattcaaacgcttccagccatggaaagtctcagggcagggccagcaggggtttcagcactccatgggggttgggaaggaccccagcccctggcctggctcttgttgagaaggctggcattcccattacacatgcacgtatacacacacgtacacaggtatgtatacacacgtctgtatgtatatcattcttaacagcttcattaaaatacatttcacacgctacacagtctggctgcttaaagtgtacagctcaggcgtttttagtacactgacagggtgtactttttttttttttgagacagagtctctctgtcacataggctggagtgcagtgacgtaatcccggctcactgcaacctccgcctcccgggttcaagtggttctcctgcctcagcctcctgagcagcggagattacaggcacgtgccaccacgcccggctaatttttgtgtttttagtagagacggggtttcaccatattgaccaggatggtctcaatctcttgaccttgtgatccacctgccttggcctcccaaagtgctgggattacaggtgtgagccaccgcgcccagcagagttgtgtatctttcaccacaattgtagaacattttcatcacccccaaaacaagccctgtccccattaggcatcccctcccgtccccctccccccagccctcggggagccagtccccttcctgtctctggatcggcaggtcctggacatttcgtagacatgggatcacacgctgcgtggccttctgtgtctggcgtctctcactgagcgtgatgtcctcaaggtgcatccgcgccgtggcctgggtcagagcctcgctcctgttcacggctgagtcatgtcccagtgcgtggacggccacattgcgtttacccacacatctgtggatggacacccgggttggtttatctgtgaatctgtagttaccccccgagatggttggagcttgtgctctgttcacactgaggagtccgggtcctactttacataagtgtaagtcgtgacagtgagtttctttaaaaagaagaggcagtgatcagatgacaggtggccctgggagtggcgggagtgtgagaagagggggccgggattggggggacctctgggtgggggcttcctctgaagatggaaagaccctaatcgactccctggggcagcaagcatttattgagcacctgctgtatgcctggtgccaggga[131 bp omitted]catggtgaaaccccgtctctactaaaaatacgaaaattagccgggcgtggtggcatgtgcctgtaatcccagctactcaggaggctgaggcaggagaatcacttgaacccaggaggcggaggttgcagcgagccgagatcgcgccaccgcactccagcctgggcaacagagggagactccatctcaaaaaaaaagaaaagaaaaagataagtaaagtgatccgggtggtgacagctgcaggggtgcctggggctgaaaattaggacagaagaggcctaaatgaggaggtgacgtctgcagaaaggccttgggcctgaggcccggggaggtctgggtgaccgtgcaccaggcagcaatgcagccagcacaatggccctgcagtgggagctctgtgggacgtctcaggagtgtggctggagtgcagtcgcgtggggagggaccatggggcctctgcagcagggtttgccctgagaccctgctgaaagccagggaaggccccgttcacgcctcactgccccgtcttcccctgagggcccgggcagggtcccttcccaccccaggttaataggcaacaggtttgcttctctgcatctgtggcctgctttgacctccgtcttctcctctcccccggggtgatgcctctctgccgtaacccgtttagggttctcggtgccccagagactgggatggccctgggggcctccgtgctgcatcctgggagggctgggaggaggttccttcctggaaggctgcctggaggaggtggctgtgcttgagctgatcttggcggtggagaagggaaaggggaagctgggagctgatgaagggtgaggggctgacattggggcttggactccggggcttggagcagggcagggcggtggaggaagcagggccgggggtgccagcgctcaggggagacacaggctctgaggaccgaggatcaccgggactgggaagcagctggggtccagactccccgaactccatcccctgctgcccccgcaccccacacctcgcagccccgcgtgactcccccaccccccacaatggccaaggtcaccgtcagctctttcctttcaattagcagcaggaatgttcccggcgctgggctcggcgcctgcccgggcagggaccccctcgttctggctggagctgcccgggcgtgggttctggaaggacgagtgcgacgcccccatcccacacacgcccctcccgcctcggacagggcccgccctgctcgctgggtgaccttggccgttgcgtaacctctctgggcccttccaacaccaacgccccgcaccgcggaggcctctgcggggctcccgtcgggtttgggcctcatgaactcatctcctggagcaggactatctcacgcgctccagacgacgccctcgccgggccccgagccgcccacaccgccacacgccgtaaaaagcatcgcggggacgggaggcctgtgcgcgccggggtgggcgtcgggcggggggcgtggcgctccaggggctctgcgcggctgccgggagccagggaggctcggagacccagcacctgccccgggacccccagcacctgccctgggacccccagcagcaccaggaccgccgccgccctgagcttttccacgcctttgcccgggactcagctcctccgcccagcatgtaagaccttttgtgatccgacctccgcttccttccgtgacccctgcgccggggtcctggtcccagcctcgccgatcacacgggaatgagactcccccgcgcctggcgggccccgcccgcaggaggatgaacgccgggagaaggccgccctgcccggcctcagtttccccgtcggtgaaatggggctgacccggccgcaggagggagcgagcgctgggggaggcgttctcggtttgtggccgttttgatccgtgcgtcgtggtcatatttcgcttaatttttccaatctgtgacgtggagcgttctgtcggcctgaccttggctacccggcgtcgggggcgggtccacacccctcccggatggaagccccttcctgggcgggcgccccccggacgcccagacggggacccccctcccctcccccagccgcagcgcgggggagaaattcccgacccctcccgcccgtctaggccgccccaggcccgaagcctcggccccccccaatccccccaagcacaggccgggggcgggagatgctgcgccggccccacccccgcgcgccgggcctcggcgttgccatggggacggcgcggttgccacggcgaccgcctcccgcgggcccctccatccatcaccggggcggcggcgcccgggtctggggaggggcgaggggggcgcatcctgcgtgtcctggggaaaggcgagggggcgtccaggcccggggaggggcgaggggggcgccgggtctggggaggggcgaggggggcgccgggtctggggaggggcaaggggggcgcatcctgcgtgtcctggggaaaggcgagggggcgcccgggcctggggagaggtgaggggggcgccgggtctggggaggggcgagaggggcgcccgggcctggggagagtgaagggggcgccgggtctggggaggggcgaggggggcgccgggtctggggaggggcgaggggggcgcccgtgactgcgggggccaggggggcgcgtcctggggaggggcctgcgccctggggctgcttcccgcgcgttccctgcccgcccgcctgacattcccccgccctggccggccgggcagggacaggctgccccagacactaccgccttgtctccagcctgggaggcggccacacagccacactctgtccccgggtccggtctgagcggccacctgcctgccgggtggggacctgggcagtcggcgaccagcctgatcctggggcccaggagttccgccgttttgtggacctcccgccccagctctgctccctccggggtggccccgagcccacttagagctggaaaccaggactgtggggtggcccggggctgggcggttgttgttccaatctggctgtgcccagggccacgctgtgccctccctggacgtggcttccagccatgggaagaaggtgccgggcagggggaaccgtgtgtgagaggccctggggtaggaggcttggtgcatagccagggggccctgcaggagtagaccaacgggggaagtgaaggggccgacctgagggttcctctaagggctgatgggagccagggagcctctagagctggagagggacagggtctgattaattattattattattattgttattttgagatagggtttcactctgtcccccaggctagagtgcggtggcacgatctcggctcactgcaacctccacctcccgggttcaagtgatcctcctgcctcagcctcccgagtagctgggattacaggcgcctggcaccacccccagctaatttttgtatttttagtagagactgggttttgccttgttggccaggatggtctcaaactcctaacctcaagtgacctgcccaccttggcctcccgaagtgctaggattacaggcatgagccaccgtgcctggccttctttttttaattttaaaaaaattttttgtttgtttgttttgttttttgagacagagtttctctcttgttgcccaggctggagtgcaatggtatgatctcggctcaccgtgacttctgcctcccaggttcaagtgattctcctgcctcagcctcctgagtagctgggattacaggcatgtgccaccatgcccggctaatttttgtatttttagtagagatggggtttctccatgttagtcaggctggtctcaaactcctgacctcaggtgatccacccgccttggcctcccaaagtgctgggattccaggcgtgagccactgcacc[139 bp omitted]cctcagcctcccgagtagctgggactacaggcacccgccac[183 bp omitted]cctaggctggagacagtggcacaatcacggctcgacccagcctcaacctcctggattcaagtgatcctcccacctcagcctcccaagtagctgggaccacagggacataccaccacacctggctttttatttatttagttagttagttatttttgtagagacaggctcttgctatgttgcccaggctggtctcgaactcctgggctcaagcgatccactggccttcacctcccaaaatgctggaattacaggcttgagccaccacacctggcctagggtctgattctctttttgagaagctgcctctggctggcgggtggagagggagctgtgagggggcagggagttggcagggaacactagaggcctgggctagggtggggaacttggggtaggcaggaagcgagggcccgggcctcaagggaacgcacagtggatggttcactgcctgcatcacccgttgctggggctgaccgagaactccagctgagctggctattcaggaagggcccccaagccagaaagctggatcaagcctttcctgaaccccacccggtgaaggcagctgaacccagcctccctgaggagggagaagggaaagccacagagggcgcagctggtgttcccgggcccctgggaggcaccgggaagggtaggtgtcacctgccaggaagggaggagccggtggggtcacctctggggcatgggagctggacaacttcacaggcctcagcagggccaggaaaccaaacccgagtggggtgggcaggcggggcgcctcgggctccagggaggtcttgacccggagcagcctcccaggcggggctgggggtgagccagtgcactgtgcagtttcattttctctgctgaactgggggaggggatgggggcacaagggggacgtcataggaggccttagagctgcaggcatctgtgcctccgtgtttgcgtggatggggaaactgaggcccagagaggcacgagggctctttggaggcagggctggctctgggccctgacaccaggctgagagggctgggggtggcagcagacacgaagggcaggctgtaatttcagtctctgggaagataagatgttgggggtcgggggaacctgtctcccacccctcacccctggttcccgccaggccctgcccgtcagcctgggcctccccctgttgatgccgcccagagcttgggacacccaccgccaacccctaccgtcctctccctgcctcgctgcaacagccttggaagcctgagggtcgctgggaaggtcaaggccaagctcagccccagtctagggctcggtgctccttgcgtttttctttttgttgttttgttttgttttgtttttgacggagtctcgctttgttgccctggctggagtgcagcgcgtgatctctgctcactgcaacctccgcctcctgggttcaatcaattctcctgcctcagctcctcaagtagctggttttacaggtgcctgccatcacgctcggctaatttttgtattttttggtagagacggggttttaccgtctctgttggccaggctggtctcgaacttccgacctcaggtaatccgctcgcatcggcctcccagagcgctgggattacaggcgtgagccaccgcgcccggcctgctttttgcattttactaagcacctactacgtgcagctttctgagggcccacagaccagggaggggaggggagggtttgggtggcaaagctcttcttctagcaggtgggaggggaagcgagaaagcagtggggtgggggtgccctgaactccgtgtgaaccacggggctgcagacagatgaggagaggggctctgcaccagcttctggagctgcagggcgaggttgctgtggggaggtcagagaaccacagaattcctcggttctttcctgggcgagtgagcgtgtggtgggtgcctggtgggggtggcgagggcttcggtttctggacctccttcccacaccacaaagggccctgtatctttgaagcctgaagcccggtcccttcaggcgtatccggcaacagtggtattcattcattcatttattgtttgtttgtttgtttgaggtggagtcttgctctgttgcccaggctggagtgcagtggcgcgatctcggctcatgcaacctctgcctcctgggttcaagccattctcctgtctcggcctccaagtagctgggattacaggtgccgaccaccacgcctggctaatttttgtatttttagtagagacgggggtttcaccatgttgggcaggctggtctagaactcctgacctcaggtgatcctcccacctcagcctcccaaagtgctgggattacaagcgtgagccactgcgcccggccattcattcatttttgagacagagcctcatgctgctgcccaggctggagtagggtggtggggtcatggctcactgccccctggacctcccaggctcaagcagtcctcccaccttagcctcccgagtagctgggactacaggcgcacaccaccacaccttgataatattttttatttttatttttggtagagatggggtcttactagattgcctaggctggtctcgaactcctgggctggagtaatcctcccacctcggcctcccaaagtgctaaaattacaggcgtgagcagctgtggttttgcttttgttttgttttgcgacagggtctcactctgttgcccacgctggagggcagtggcgcgatctcggctcactgcagcctcgacctcccgggttcaagtgattctcccacctcagccttctgagtagttgggagcaattctcgtgcctcagcctccacgcccagctaatttttgtatttcttggtggagacaaggttttgccatgttggccaggctggtctcgaactcctgacctcaagtgatccgcctgcctcagctgccccctgatatttgttaagcgcctaccacataccagccctgggaggtgaggc[140 bp omitted]atggtgaaacccctgtctctactaaaagatacaaaaattagccgggcgtggtggcaggcacctgtcatcccagctactcaggaagctgaggcaggagaatcgcttgaacccaggaggcggaggctgcagtgagctgagatcctgccactgcactccagcctgggagacagcaagactccatctgaaaaaacaaacaaaaccacaatgattggataagagcgagtctggggttgaatccggacttggatcctttgctgtgcgtccttgggaggctcgtctccctgtctgggcttttgcaagcccaggcttgggaggtggggctggtgggtctttcatcctctgtttgcccctcctggggctgcagagtaggtcttggtgggcaggagggtgcagagaggactgtcctgatctgtcttatggtctgggccaggaggtgatacacttccttcttcccgaaacacccttctctggcctttgatgcctggtgaactcctatgtatccttggtggccctgcctcaatgtccccttctccccaaacccttcctggtcgctaggcagagcctcgtcccctcctgtcctggcttccttggccgctgagggggcagggagggccccactttacagaaggggaaactggggttcagagatgaaatcccttgccctggttacccctaggggaagaggcagagctgggatttgaaccgcgtctgacggacagcagggctcagtgaaccagagcttgaccttatctccctcccgcagggtcctggcggcagagaccacgtcccagcaggagcggctgcaggccatcgcagtgagtttccgccgccccgcagacggtgtggtcagggtggggaagtggggggacctggggtctcgggccctggacctgtcctaggacctggaaccagggcatggtgggtggtgagttatttgcttgggaaacttggatcctgctgacccgcagagaatggaagtggagaccccctgagtcggcagctcctggacccccggcctcgctctgcctgatgggtcggtggggaaactgaggctggcattccctggaaccctgccctcgtcctgcaggaaaataaactttggtgatgggagcacagatgtgctttggtgccatcttggtggcctctggcccaagaaggccctcttggtgtccgcagacccctctctgtgacccgaccctcctgtgacgtggcccgattcctgggttcaagtgactctcctgcctcagcctctcgagtagctgggattatgagtgaccgccacgacgctgggctaattgttgtatttttagtagagatggggtttcaccat[139 bp omitted]ggctggagtacagtggtgcgatccgctgtcacctggaagccagtgggccacgaggatccccggacagaggaagcaggatcgggctgggcagagccttgtgtgggggtgggggggtctccgggacccccacgcccatccctgaccccacccggccctccccacaggagaagcggaagcggcaggcggagatcgagaacaagcgccggcagctggaggacgagcggaggcagctgcagcacctgaaggtacgagcggggcagggacccagggtcagggagtgcaggcggctgtgaggcggaggccccggactcctgcccaaccctgaccctgaccccaatcccaacctgaccctgaccctgcctccagccctgaccctgaccccgaccctgaccccgaccccgaccccgaccctgaccccaacctgaccccgaccctgaccccaacctgaccctgaccccgaccctgaccctgatctcagtcctgactctgaccctgacctgaccccaacctcaatcctgaccctgaccttgactctgacccagaccctgacccccaacctcgattgtgattctgacctcagcactgatcccaaccataaccctgaccccaaccttggtcctgcctcaaccccgaccctgatcctgaccctgacctcagtcttaagtcttaaccctggccctggtcctgcccacgactctgacctggatccctgctgctcagtccaaggcactgcgggagcgctggctgctggaggggacgccgtcctcggcctcagagggggatgaggacctgaggaggcagatgcaggacgacgagcagaagacacggctgctggaggactcggtgtccaggtgggggctgcagcgtgggtgccaccgggctgggtggggcctcgggggccgctggctcccgggagggtgtgggctgggaagagtcgtcagtgtgctttgagggagatgcgtggaccgggcaggccaggacccaacatgctttgagggggacgcaggacgggacagatcaggttggggcatccacctgggtctggggcagcttgctgggggcagaggctggctgcgtggcctcaggcagggagatacccctttcccttcccaccgccctcgtttgagccagcgagggacgtggcgtcgagctcctgggtccctggagctggccagcgggggacgtgacgtcgagctcgtgggtccctggagctgggtgttgccggcattggcctccctgggggcttcctggcgccagcccagctggcgggcaagcgctcccatggttcgaacgggatggatgcagagcagctgggcccgcaggaagctcgggcgggggcaggaaggggacaggatggggaaagtggcaatccctgtgggggctgggaccaaaggcctggagtttccggcgggcgggaggcccaggctgtgctcgggggcagcagggtcagggtggagggaagtgacgaccaagattccaaacgtctgccctggccagggaaggtgcccagaggcgggaggccggccggatcacacggacctcgcaggcccttcccagacgctgggttctgaccccgtgggggcccctccctgcccagttctgcccatttgctttgaagaaagcacgttgggggtgttcgggatggacttccctcctgggcagggcgtgtaaaggcatggacaggccgggtgcggtggttcacacccctgatcccagcactttgggaagccgaggcaggaggatcacttgagatcagaggttcgagaccaacctgaccaacatcgtgaaaccccatctttactaaaaatacaaaaattagcctggtgtggtggtgcccagcctgtaatcccagctactccggaggctgaggcagaagaaggccaggcg[208 bp omitted]gcttgcagtgagccaagatctcaccgctgcactctggcctgggcaacagagtgagactgggtctcaaaaaataaataaataaataaaaataaaggcatggacatgctgggcgtgggtggggctcacacctgtaatgccagcactttgggaggccgaggcaggaggatcacctgaggtcagagatttgagaccagcctggccaagatggcgaaacccagtctctactaaaaatgcaaaaattaggtggattagtggcgggcgcctgtaatcccagctactggggaggctgaggcaggagaattgcttgaacccaggaggcggaggtttcagtgagccgagatcaagccactgcactccagcctgggggacagagcgagaatctgtctaaaaaaggaaggtatggacagggtggggcagttctggtgggtttggggccttggaatgagccgagtgttacccactccctgggcctcagtttcctcacctgtgaaccagggaggc[131 bp omitted]ttctcctgcctcagccttctgagtagctgggattacaggtgcccgccacgcctggctaattttgcatttttagtagagacggggtttcaccatgttggttaggctggtctcgaactcccaacctcagctgatccgcccgcctctgccttccaaagtgctgggattacaggtgtgagccactgcgcctggccccactgtgcatcttaattccagcaaacattaagcaccagctgtgtccctgggctggacgggatgttcagaccgaggtggggctgagacgggcctggccctgtctgcagagaggtggatggtcagacacctgggcgaaggcagtgggagttactggccgtgggggctgggcacactggtgttcttttcacgcggccctagtgggcacaggctcaggcccctcgatggagggtgaagacctggcttgaggcctagtttgctttcagaggcttcagcttcacccctccccagggcagcctgcttctcaggtgctgaaactgagctgctctgggtctccactacccaccttctgcctgctcaggggctctgcccaggcacctcctgcaggaagccctccaggctgactgtgggctcccagacacctcctgcaggaagccctccaggcggctgtgggctggacccctcttctggttggaggggacacaagtctggctctgtgtccaacctgtcagcctgggcccaccttgttagacttacgcactcagccctcgtctgtcctgtcctcaggctgaggctgagctgccgtgaatgtcgcccgcccttgccagaccccggggctgggatttcatatcccggttttgttttcctggatctgcttgtcccgttatctcttctaatacttggaaagtgacatggtttttccagtttccctggtgagataaagtttcctgttaaaatgtgcaaatttgagcgggaaaggagagttcatttgatacagacagtgacataaacagcgcaggccaggggtcaggggacacagggagtcagccctggtttggatcccgcctctgctacctgctggccatgtggcttttgcactccgtgcctcagtttcccccatcatgaaagagcacgatgcctcttggggctgcctgggagccttaaattcagagagctaggccgagtgcggtgggtcacgcctggaatcccagcactttgggaggatgaggcgggcagatcacctgaggtcgggagttcaagaccagcctggccaacatggtgaaaccctgtctctgctaaaaatacaaaaaattagctgggtgtggtggtgcacgcctgtaatcccagctactcgagaccctgaggcaggaggatcacttgaacccgggaggtggaggttgcagcgagccaagatcacgccattgcactccagcctgggcaacaagagcgagaatctgtctcaaaaaaaagacactggggagctgtcgtacagaaggtgcccagagccccaccggggatgcaggagtcaccctcacaggcacaccctctccccaggttggagaaggaaattgaggtgctggagcgtggagactccgccccagccactgccaaggagaacgcggcggccccgagcccagtccgggccccagccccgagtccagccaaggaggagcgcaagacagaggtggtgatgaattcacagcaggtaagggggtgactggggggagcggatccccaggcacccactcccgctggccccagagcgaggccccagcccttccatgtcagcgtagctgaggggacaggcacagactagagccaggcacttgatttccagctcaccggagccacttcccagctgtgtgagccgggacacgtggtttcgccttgctgggcctcggtttccccatctgtaagatgggggagtaatcagagcagccaccgctgggggcatcagaaggactcagggaagcaggagacccacctgggggcatcagaagggctcagggaagcaggagacccacctgggggcatcagaagggctcagggaagcaggagacccgcctgggggcgtcagaagggctcagggagcagcaggagacccggtgctggtgggtgtggtcatagtgtttttttgcttttgttgttttttgagactcgttctgttgcccaggctggagtgtagtggtacagtctgcaacctccacctcccaggttcaagcaattctcctgcctcagcctcccaagtagctgggactacaggcgcctgccaccatacccggctaatttttttgtatttttagtagagatgaggtttccccatgttggccaggctggtcccaaactcctgacctcaggtgatccacccaacctcggcctcccaaattgctgggattacacgcatgagtcaccttacttggcctggttattttgtttctgtgtttgtttttgacacagggtctcactctgtcacccaggccagccagagtgcagtggcacaatcacagctcactgcagcctcgacttccccagctccagcgatcctcctgcctccgcctcccgagtagctgggaccacaggcacgcaccaccacgcccggctaatttctgtatttttggtagaaacggggtctctgctgtccaggctggggttttcatggtttctatcgatcacctgcatctgtttcatgtggccaaggctcctgaaagcccttcctgtgggaacagtatccccgtgtgatggaagtaaaaatcgcagcccacagaggcagagaggctggctcaaggccacacagctgagtggtccttagtggagtcggctgttaattctggcatctgccatctaagccagacgatgttaaaaccagacccttggccgggcttagtggctcacgcctgtaatcgcagcactttgggaggccgaggcaggcacatcatttgaggtcaggagttcaagaccagcctgaccaacatgataaaaccccatatctactaaaaatacaaaaattaaccagatgtcgtggccggcacctgtaatctcagctgctcgggaggctgaggctgagaatcacttgtacccagggggcagaggttgcagtgagctgagatcacgccactacactccagcctgggagacagagcaagattctttctaaaaaaaaaaacctggttctgggcacagtcctggacctcactgagctcacgtcaggtgggaagatggcgtgtattggggaccacccagggagggtggtcaggccgaagaggtgggaagcccagggcgctgtggaatccccaaggaagtgcctcattcgtgggagggctgggcaggcgacctggaggatgtgggtttcgtgggagggctgggcaggcgacctggaggacgtggggtggtttttttgtgtttttttttttgagacagagtttcactcttgttacccaggctggagtgcaatggcacgatttcagcaacctctacctcctgggttcaagtgattctcctgccttagcctcctaagtatctgggattgcaggcgcccgccaccacgcccagctaattttgtatttttagtagagacagggt[131 bp omitted]taggagttctccaggtgcttttccctgaaggttgtttgagcatggactagtgctgtcatgggagactcagcaatacacatgcacggcccctgccttcctgacgggcacacccagtgacgtgatgagggaagagtgcactgagggagcatcagacaccacagccctgagacaggagtgtgtcccagaaacagcaagaagaccagggatgccagggcacagttcagggagaggggcctgtgtgcagggtctgaccatgcagggcagaacgggttcagacaggcgacactagaccctgagcctcgcacagtggctcccaggaggccaagggaggaggatcgcttgagagcaggagtggacgagactggagggggcacggaggagccggctggattcagggtggcctgcgggagccgctgatgcgggggtatgtggggagggagggaagaaatgagatggagcggacgtggtggctcagcctgtaatcccggcactttgggaggccgaggtgggtggatcacctgaggtcaggggatcgaaaccagcctggccaacatggagaaaccccgtctctactaaaaatacaaaattagccaggtgcgatgacgcaggcctgtaaccccagctactggggaggctgaggcacgagaatcgcttgaacccaggaggcggaagttgcagtgagccaagattgccccattgcactccggcctgggcgacaagagcgaaactccatctcaataaaaagaaaaaagaaagatgacctctgtgtttctggccagagtcccaagaggataggatgagaagcgggtgcgtatgacgtcacccactgtgccatgccctccccaggctcctgaccccatggctccccttcctcttcccggggatgctgacgcccctgacccttctctcttctttcttgcagacgccggtgggcacgcccaaaggtaggacctctggaaggaactcgtggggcctcggcgcactctggtggccagagaggggatggcagggcggggagtgaagctacaaagttgctcggtgcctcacgcctgtgatcccagcactttgggaggccgaggcgggtagatctcctgaggtcaggagttcgagaccagcctgaccaacatggcgaaactcagtgtctactgaaaaaatgcaaagacaattagccgggtgtggtggctcatgcctgtaatcccagcactttgggaggctgaggcaggaggatcgatcgcttgagcccaggagttcaagagcatgctgggcaacacagggagaccctgtctctgccaaacataaaaaaattagccgccggccaggcccagtggctcagacctgtaaccccagcgctctgggaggctgag[132 bp omitted]gtgggaggatcacttgagcccaggaggttgagctgtgatcgcaccactgcaccccagcctgggcgacagagcgagaccctgtctgtaaactgcatttcacggaacgtgtccgcttctgtatcgatagcgggacagccaccagccgggattgacgctggcgtctgaagtgcttctggcctggtttgttgtgtgttaattattcataaggagagtgtcttcttgtcttactgtagaattaaaaattaatcattaaaaaaatccagacaggcctctcagggattttgtgaaaatcactgggctgaggatgaggaatgaactgtgaggctgcctgtgggattttctaggggttgcggtgggggtccaggtgcctgtgtctgtgcggggcctgtgtctgggggcccaggtgcctgtgtcctggtgtctgggtggggtctgtgtgtctgggggcccaggtgcctgtgtcctggtgtctgggtggggtctgtgtgtctgggggcccaggtgcctgtgtttgggtgtctcggtggggtctgtgtgtctgggggcccaggtgcttgtctggatgtctgggggcccacaggtgcctgtgtccgggtgtctgggtgggatctgtgtgtctgagggcccaggtgcctgtctggatgtctgggggcccaggttcctgtgtccgggtgtctggatgggatccgtgtgtctgagggcccaggtgcctgtctggatgtctgggggcccaggtgcctgtgtccgggtgtctgggtgggatctgtgtgtctgagggcccaggtgcctgtctgggtgtctgggggcccaggttcctgtgtctgggtgtctgggtgggatccgtgtgtctgagggcccaggtgcctgtctgggtgtctgggggcccaggtgcctgtgtccgggtgtctgggtgggatccgtgtgtctgagggcccaggtgcctgtctgggtgtctgggggcccaggttcctgtgtctgggtgtctgggtgggatccgtgtgtctgagggcccaggtgcctgtctgggtgtctgggggcccaggtgcctgtgtccgggtgtctgggtgggatctgtgtgtctgagggcccaggtgcctgtctgggtgtctgggggcccaggttcctgtgtctgggtggggtctgggtgtcaaaggcccaggtgcatgtgggagtccggatgcacttctgtgaaggggcgttgggctgtctggggggtccatgtgacctctcctctgaccctcatctctctctccgcttccacctcccgtgcagacaagcgagtctccaacacgcccctgaggacggttgacggctcccccatgatgaaggcaggtgggttggcccccaggctctgggccccagatccagccgctgtcagggaccaagtctcggtccggggggccgggtggggcgggggcgacaccgacctgctctccgcagcgtctgacggggccgtggttatgggggtggcagctggaccgaggccgaggctccgagcctggggtgggggccccctctgctttgttgccctggtcccacgccggcccacgcttccccgagaagacgggccccacgcatggcggctctaaccgacgcgacctcacggctttcattccaccctaatctcacggctccctcctggggcccgctgggggtggcgctcacgcctgaacatgctcgctgcaaatcttacctgctccagtcctcgggcagtaggactggctgccccgggagaaagtgggtgccccgtccctggaggcaaccaagccaggtccccagcaccgctgcgcttccgagaagcaggggaaggtgggggttgacgctgagtgccacacggtgctcaagtcaggctcgaacccctggtctgccgccttgaatttctccgcctgccagaggggtgggacctcagtacgccatcctggggcccggcacaggacaggagcccaataatgagaaatcgtcgcagtgggcaaaaccactgctatgtgagtgagctggaacagcacagaaagaaggcagagggccgggcgtggtggctcacacctgtaacccaccccagcactttgggaggccgaggcgggcagatcgcctgaggtcaggagttcgaaaccagcctggccaacatggcgaaaccccatctctactaaaatacaaaaattagccgggcatggtggtgcacgcctgtaatcccagctactcgggacgctgaggcaggagaatcgcttgaacctgggaggcggagtttgtagtgagccaaggtcgtgccactgcactccagcctgggcgacaagagcaagactccgtctcagaaaaggcagcaaggcagggaggtgaagaaggactctggggtggctgcccaggacgggacagggctggaaggaaggagagccacccggaggcccaggtctccagcacggtccagggtgggggttgccccaggatgcagcagacagaggcatttgtcagagcaggtggtgcctgtgggcctctgtgccagtgagaccagccctggcagacaccgaggcccaggtcccccgctgatccccgtggccactgactttgtgcagtgcacaacctgctcaacagtgtgggcagctctggactagctgtctggggtggagggctgaggctgtgcagagctatagagttgaaaaacagtcgtcccttcacccagaatgcctttcaagcgcctgctgcatgccaggcattgggggagagggtattctaatgagggccacaacctctactacggtagaaaagtgaggccaaggacgttgagctggaggaaggagaatttgaaccagagggctcaggggaggggagcgttcaacgtaagaggtgacgtctgagcaaagacccagaggtgctgagggagcaaggcacgcagctatctggaggaaggtgtccaaggcacgcagctatctggggaaaggtgttccaggcagagggcacggccagtgcaaaggccccggggcaggactgcgcctggggtgttggaggaacggccaggagatccgtgtggctggagcagcgtgaggagggggagagggcggaggagagatgatggagagattgttgagggccctgtggcaggggcgggaggggacgtgggcttttcccgggagggaggcaggaaccatggggggctgcaggcaaagccgggactgccccgactccgtgctcacccacgccctctggtgactgcagggagaacagaccgtggacggtgccaggtggaggggacagggctgctgggggaggaggctgggatgggccgtggaggggcgagcagtgggcggttccttatgttctgaaggtggagcccccagggtttgaggagaaacgaggtgtcagggaggactggccaggcacggtggctcacgcctgtaatcccagcacctttggaggccaaggcgggcagatcatttgaggtcaggagttcaagaccagcctgagcaacatggtgaaa[131 bp omitted]aaaccctgtctctagtaaaaatacaaaaaattagctgggcatggtggcaggtgcctgtaatcccagctgctcgggagccttaggcaggagaatcggttgaacctgggaggcagagattgcagtgatctgagatcacgccactgcactccagcctgggcaacaagagcaaaactttgtctcaaaaaaaaaaagagggaggactgagctgcccccaacgggtgggaagagccagggtgggggcaggtgtagggggcagattgggagtagtgttatggacgtgtgagagtggggcccctgtggataggggctgagtccaggtcaaggtccaggtggggatgggtgtgcgggagattagagccgagtgcctgggcgaggtccccggcgcagagcagagtccagggccgcagccgggcctaagcgtcgaggttgggtgggaggagggaaacgaggtggctatgggggccgaggggccaggcgatggcagggctgcccacgatggggaccgatggcccctcagaagtggtgaggacatgcagctatctggggggtgtgccaggcattgggaacagcctgtgcaaaggccctgaggctgggccgcacctggggtgcagtgtcatgggtcaggccagtcctggcagccctgttcagctcccgctgcggggcggggtctcagggaggtgcctggtgatccccagtgctcgtcatcttcaagcaggcctgggggtggcgggcagccaccagtcgctgttaggatgcaggctctgtgtggtttctgcaggaatgatttttacagagtggggcgaggtgctggctgtggagttagggccctgatgagtagcaagttcgactatctcaggagggttccttcattctgagtctaaatagatgacggcgtgtccaaccgttggctggaaggaggcgtcaagtcctgggagcttggatggtcggggcgggggctgtgggtctgcagactgagccccagtctccgccgtgaccccgggcaaggcaggatctctctgggattcacctgctcctctgagaaaccaggaatggtggggctcgagggctcacgtttataatcccagggctttgggaggctgaggtgggaggattgcttgagcccaggagtttgagaccagcctgggcaacatagtgagacccccatttccaaaaaagataaataaattagccgggtgtggtggcgcacacctgtggtcccagctacttgggaggctgaggtgggagaatggggtgagccaggaaggtcatgactgcagtgagctgtgatcgtgccgctccactcca[140 bp omitted]atagagaaaccccgtctctactaaaaatacaaaaattagctgggcgtggtggcgggcgcctgtagtcccagctacgtggaaggctgaggcaggagaatcgctagaaccgggaggtgagtccagatcacaccactgtgctccagccggggcgacagagcaaggcggctccatctcaaaaaaattaaaaagatccgggaacaatgaaggctttccagatgggctgggctggaacctgagcttgacagacaatagtttggtggcgaaacagaggacacagtgcagagtacagggacgaggaccatctgggcggacagcaggatgggcctcaaatgccaaggagaggtgttcagactggtcgtctccaggcactggggagctatggagggatgtagagttggggagggccgcgtcgagaaggtgcccaggcatccccggctccgcctgccccatcgctgcttggctctgcgctgctggctcccccctccctggcttggccgcagcccggcgggggggtgcgggggcgggcaggccgtggtgtaaccccgtgactctcgtgccagccatgtactcggttgagatcactgtggagaaggacaaggtgacaggggagaccagggtgctgtccagcaccacgctgctccctcggcagccgctccctctgggcatcaaagtctacgaggacgagaccaaaggtacgagcaccccggcccctgccctccctccacctgggccagagccccgaacacgtgtgctcccagcgtgtgggtctggcgtctgccccggaatcaggaccccgattcgatgtgaagcagatgacgctgttcaggccagggcctcaccccctgtggcccacagctgggctcagaggtcgttcagccctgggctcactgcccaatcattcatccactccagaaagctgcctgaaagctgagccgggcaccaggtacccagctgggctctggagggaaatccggaggtagattcagcttctgtccttgccgggtggcaaaccgggcccttccatctggagctcctaaataattcgtttaaataattactgctagcccaagggctcacgcctttagtcccagcactttgggaggccgagggaggaggatcgcttgagcccagaagtttgagaccagcctgggcagcatagcaaggctccgtctctaccaaaaaaaaaaaaaaaaaaaaattaccctggcatggtggtgcgtgcctgtggtcccagctacttgggaggctgagatgggaggatcacttgggcccaggaggttgaggctgtagtgagccgtgatcgcaccactgcactccaacctgggcaacagagtgagaccctgtctcttaagaataaaaaataataataaagaattgctagcgtgacagaagccacagaaaatgcacatccagggggctgtgagaagtctcacagggtgaggatggggccgggggaggcttcccagaggaggcaagcaggggctcatcagagacacgcagtgcatgggaaccacacctggcagagccgcagcccctgcaaaggccctgaggtaggatggagtcagctgggctggagggctgaggggagttgggctgcaggagtgaggggagacgggctgcaggggtgaggggagacgggctgcaggggtgaggggagacgggctgcaggggtgaggggagacgggctgcaggggtgaggggagctgggctgcaggggtgaggggagacggggtgaggggagacgggctgcaggggtgaggggagacgggctgcaggggtgagggggaaccaggttggtcagggagttgaggagctgggctcacgcagggaggagaagggtgctttgcctggaggcagggggacaggcggggccgtgtcctgagggctttgggaagccttgggtgcgttgggtcctgacggtgctgaggtctaatttggttttaagggctcctcctagaggtcaagaggcaaacaggctgtgggagatgccagggaccccaggaggaggagggaagctccacactgaagccccactctctctctttctttttctttttatttatttactttctgaagaaagagtttcactctgtcgcccggcccgcagtgcagcgatgccatcacagctcactgcagcctccagctcctgggctcaggcgatcctcctgcctcggcctcccgaaatgctgagaccacaggcatgagtcactgcacccggcctctttttcttttatgagatataattcgcagaccataaaattccgccttaatgggaggctcatctgggcccgggacattgaggctgcaatgagctatgatggcacccctgcactccagcctgggccacagaccaagaccctgtctcaaaaacaagaaagaggagagaagccccatccccatcagctgtcacttcctgtcccctccccagtcagcgtcactccctatcccctccccagctctggcacccacgcatcccctcctgtctctctggattggcctgtcctggacatttca[131 bp omitted]tctgctaaaaatacaaaaattagctggacgtggtggcggacgcctgtaatcccagatactttggaggctgaagcaggagaatcacttgaacccaggaggcggaggttgcagtgagccgagatcgcgccactgctctccagcctgtgcgacaagagtgaaactctgtctcaaaaaaaaaaaaaagaaagaaaagagaataaatggggtcacacactgcacgtggccttctgtgtctggcgtctctcactgggcgtgacgtccccaaggtgcatcggcactgtggcctgggtcggagcctgactccttttcatggctgaatactattccacgggttgggtgggccatggtgggtttatcccttcttccatctgtagacagttgggctgtttctaccctttggctgcagtgagtagcatgctggggaatttgtgtgcaagtatttgttcacgcccctgctttcgaggcctttgggtgtacacgtaggagtgaactgctgggtcctgaggcgactgtgtggagctccgtgaggacctgctgttttccacggaggctgcaccgtcccgttcccacaggtcgtggatgagggcccagtttctccacgtcctcaccagcgctcgtagcccattctcgtggctgtcctggtggcgtgacgtggggtctccctgtggtttggattcccaaagccttctgttctcagaggcagcttggcctctgcggtgccccagatgctgtcagaggggtccccgcagcccagctctggagtggctttggggtgtggcgttggtggcatctcagctctagctctccccagctgtgtggccctgggaagtccccatgcctcgtcttccggatgaggtcctcacccccatcactccaccctcctcagcctcacctggtccctggggattccagacctgccaggctggacactggttgcttagcaacgggcaggtgatccgtttccatggcagccgagggctccaattcctgtcttggggcagcggccagtgggacacactgagttcagttccgcctgatccagacacaccccaccctctgggcctccagcccaaagtcattgagatgccttgaagcatggactcccctccctgggggcttagaaactgaaagtggagaacactttccttctggtctgtagccaggaacaggagccctgacccttggccgagaggaggcgagtccctgggaccccccttgcgtccctcccaactcccagcgtggcccaggcagccgtgtttctagaaggaatttgcagggctgtgagctagggctggtgttagatcatagcagggagccgtggggtgctgaaatccggtccttggagagtccaacacacctcaagaaatgtcaagtcagagacacacagataaggaaatttggaaagacttgagaaacacatttagcaagattgattatatgtataaaatgctacccagtggagaatacacattcttttcaaacacagaacattgtcagaaagtgaccaccgtggcccaggctgccaaggaggttttaggactgttaacagagtttgtatcttctgctctgtgttcctctcctccctgaaatttaaaaacaccctctaaataaattgtggcttcctgtggcaatcaatcaaact[137 bp omitted]aggtgaaaccccatctctactaaaaatacaaaaaattagccaggtgtggtggcaggcgcctgtaatcccagctagtcaggaggctgaggcag[136 bp omitted]aggacacagccaaagcagacctcagaggaaaatgcatagcctttagggaagctcctagaaaacaaaaataaatgaatgaaactttaactcaagttagaatgaatgaaaatttcaatttaagatcaatcaaatacacccatagatggaaaaaatcagaatccctgtaatggccaggcatggtggctcacacctgtaatcccagcactttgggaggccaaggcgggtggctcacctgaggtcaggagttcaagaccagcctggccaacgtggtgaaaccccatctctactaaaaatacaaaaatcagccgggcatggtggcgggtgcctgtaatcccagctactctggaggctgaggcaggagaattgcttgaacctaggaagtggaggttgcagtgagctgagactgcgccactgcactccaccctgggcgacagagggagtcaaaaaaaaaaagcagcaggcacggtggctcacgtgtgtaatcccagcaccttgggaggccaaagtgggtggatcacctaaggtctggagttcaagaccagactggccaacgtggtgaaaccccatctctactaaacgtacaaaaatcagcctggtgtggtggcaggtgcctgtaatcccagctactctagagactgaggcaggataattgcttgaacctggaaggtggaggttgcagtgaactgagatcgtgccattgcactccagcctgggcaacaagagcgaaactccatctcaaaaagtgaaagaatccctgtaacctccagttccccagggtgggtggtcctgtcttgtagaagagaaacaggccccgatgcggggaaggagcaggggtttggctctgtgaccttggcccagctgtgtcccttctttgaactttcatttttgctatctttacagcggaaatgaatccctacttttcagggtgatcacgtgggagctagttggctaaagaatatggaattacaggccaggtgcggtggctcacgcctgtcatcccagcactttgggaggctgaggtgggcagatgacttgaggtcaggagtttgagaccagcctggccaacatagtgaaaccccagctctattaaaaatacaaaaaattagccaagcatgttggtgcatgcctgtaatcccagctactcaggaggctgaggcaggagaattgcttgaactagggaggcggaggttgcggtgagccgagacagtaccactgcactccagcctgggcagctccatctcagaaaaaaaaaaaaaaaatcccaattcattcctttccactctttcttggttcctaataaatgtttttgtgcttataaattttcctcattgtcggctgggcctggtggctcacgcctgtgatcccagcactttaggaggccaagacgggcggatcacctgaggtcaggagttcgagaccagcctggccaacatggagaaaccccgtctctactaaaaatacaaaattagctgggcgtggtggcggattcctgtagtcccagctactcaggaggctgaggcaggagaatcgcttgaacccgggaggtggagcttgcagtgagctgagatcacgccattgcactccagcctgggcgacagagtgagactccgtctcaaaaaaaattttttttcctcattgtacggcattggctgcatccacagatgccaacagggggctttaattgtctgtcagttctgacggtgtaatctagttcgtgatttcctctttagcctggaggaggatacaagccttgccaaggtttccctcctgcctgagccaggtcactctctctgtccctcctgcctggagctgggtcattctctctgtctctccttgtacagtggtccatgctgtggacggcaccgccgagaacgggatccaccccctgagctcctccgaggtggacgaactcatccacaaagcggacgaggtcacgctgagcgaggcagggtccacggccggggcggcagagacccggggggctgtggagggggcagcccggaccacgccctcccggcgggagatcaccggtgtgcaggcacagccaggcgaggccacgtccggcccgccggggatccagcccggccaggagcccccggtcacaatgatcttcatgggttaccagaacgtggaggatgaggccgagaccaagaaggtgctgggccttcaagataccatcacggcggagctggtggtcatcgaagacgcggctgagcccaaggagcctgcaccacccaacggcagtgctgccgagcctcccacggaggccgcctccagggaagagaatcaggcggggcccgaggccaccaccagcgacccccaggacctcgacatgaagaagcaccgttgtaaatgctgctccatcatgtgagccggcccccgagaccccggcccccaccccacaccacagacacccaccagcccggcccctcccggcgcctgcccaccctccacccacagcctcacgggtccaggacttggcgtgttgttacatgttccttccgagttttctttcgctggaaagagggacaggggcccccacccgtcaccacgccccaacactccccccgaaccagagccgtgcacttgtgcctggtaggagagagacaggacagacccgcttttcccgagacaaggaccccccatgtcacggcagcttcacagacgcggctcgcgcccaccggggtcctggcgggtgggacccgcagcctccacgcggcccaggccagcctgccaccctctgggcctcctacctgtgcctttctctgaggggacaccccgccagagagggccccgggagccgggggtgggtactgaggcctgctcaggccctggaagtgaggctctatggggttccctggccaaggcgctggccccccaatctcaggcagttggggtgaggccgtgcctctttgggggctaaaggtcttgggtggaggacaggcccctctgctgtgcccctatgccctgtgtgggcccaaccagtggacaatggagtctgggggagggggaaccccggggacatgcccccacccgggaggggccggtaacccctgggctatcttctagacggggcgaaccaggggtcattgacctgccccctgcacagggcagggaccgagtgagccactccttgtcccgagctcccgcccccactgggccctccttcctcctggtgctaatttggggaccccaggggccgcccccggcctcttctccatcctgcttggaccagggtcctgggtcttcccaaccataccccgagatcaggccccacctgccagctctactgggcttggagcacgtccgggcagtggagggagggacacagcctgggacaggaagcctcttgggttggagcaggagaccctcatttgccacccagaccaatgtgagcctgcccccagccccctctcattggaagtggcaaggggcttccctcctgggggcagctacactcgtccccagaggcacattcgtgcacattctcacagacaccgtctcacacgttggctttggacaaccaggccccaacttggtccctgccctagggacctccagcctggtgcccagtgctcaggccacctcctggtccagtcaccacctgcagcctcggcagggcaggtacaggggccacctcggatgggagcctgggtccctgcctccgctctgcccctgggtggctgggaggagaggccctctcgggggtgacctgggcgtcagccgtggaaccccctcctcctccctggagtctgcctgagtccctcgagccgcgagccttcgctgaagtgcccttgctataaccccctctgcttctggtgtgtgacgaggcccccgatgttcttgattttcccagagaagcaaataaacagcgtgaacagccccagttcctggagttcttgcctttcaacctggcgaggaaggcgtggccaggccagggggtggggcctgccggcctttgagccattaaagggaggctgagcagggttgcggtgtgctggcttcacctgcctgcacccgctcaccctgagcgccttggggtggtgggaggcgctggaatccccactgtgcaggtaaggcctggctgtaaggggctgctgtgggggggcaggactggcttcccggggggccctcgggttctgcggccgccccgtcctgtcctttgttcctccctttgctgggctcacagcccctgggtgatgacagagggtcccctggacacccacaagctctgtagagaagccggcccctgggaaatacacaggaggcctggggaggaggtgtctgtagagaccagtgtcatgctcacgggaaggtgctgccccgccagccccactctctcacgctgtagtcttggagaagtcgctgcctcctctgggcctcagttttcccatctgtaaaataagccttcgtggccgggcacggtgtttcacacctgcaatcctagtactttgggaggccgaggtgggcggatcacaaggtcaagagatcgataccatcctggccaacatactgaaaccctgtctctactaaaaatacaaaaacttagccgggcgtggtggctcacgcctgtaatcctagctattcaggaggctgaggcaggagaatcgcttgaa[131 bp omitted]gggcgtgggacgtctccacagtgcccccagctcatgggcgatccagcctccaccctgctggggcctcagttttccccgatgaggtggtgagtgtggtggagagcactgctgagggaactcaggttccaattccagcctaaacccccgccattcctgaggcgcgattttaagctttccgtacctccgtttccctatctacaagccagggagaaaaggacgtgaagggggtggcgggaggcggcggtgggaggcgccgtgaggccgcgcaccctgagctttcacacacccagcagcgttaggtgccacgctgtcctttgggggccctttatccagatttgtccttaaacacccccatcttggccaggcgccgtggctcgcgcctgtaatcccagcactttgggaggctgaggcgggggcatcacctgaggtcaggagttcgagaccagcctggctaacgtggcaaaaccctgtctctactaaaaatacaaaaatagctgggcgtggtggctcatgccagtaatcccagctactagggaagctgaggcaggagaattgcttgaacaggggaggttgccgtgagccgagatcgtgccactgcactccagcctgggtgacaagagcgagactccgtctcaaaaaaaaaacacaaaaaaagcacccccctcctgagcagccctgctggattcgtagctgggggcctttttactcgaagaagagactgaggttcagaggggctccacaagcagcccctctggcgtaggtcaggacagagccccagcctggggaactgaagtccctgccccctcagctgtgttccctgccctcatagacggcgctaggcccagtggcccgacttccccacagatgctgggctccccacagtcccagcaaggcctctgcaccttgactaagaatccaggaggaccatgggcgcctgagggcctctgcgtccccatctctcggggtggcctgggtcttttgacggcctcgtgcggttcttttttttttttttttttttttttttttgagttggagttttgctcttgtcgcccaggctggagtgcagtggtgtgatctcggctcactgcaacctccaactcctgggttcaagtgattcttctgcctcagcctcccaagtagctgggattataatagcgtgccaccataccccgctaaattttgtatttttagtagagacggggt[135 bp omitted]cctagggaattcctcccagcagccctgagggagcccgggcgtgatgttcccccacgtcccggaggagaaaacagggctaagagaggtcaggtgggatcagaacccaggccacaccaaacccccccgagtctgccaaacctggtttatgcaagaagggggccatctaggggagttgccccaaggggtgggctgggccagaaggcacggacgggattgggactcagcccctccggccccccaggagacacaggccactgtgcacgctgagctgctgtgtggccctggacacctgctgaccctctctgagcggtgctgagaggcggtgggagggccaggcagccaagggaggtttcggctgagttctggctcctcggggccacctggaggccctgggggtggaggggcagccggcagcgggcacggtgcccgcccttgcccagcctggtatcctctttctccctcctcctcctctggactttgtttcctgatcccaggtggggctggggggagggggcacacctgcctcccctgggtggggcctctgttccctggcaacctggcgggcagggcggagctgggaggcctctgtgcccatcgaggagtcagagtggaggctgcagactgtggagccgggagccggcaggtgaggctgggggcgccccgggccgggccgggcggggatcctgtgtggggcggttggatccacatttggcgtgggagcgtcatgtgtctgtgggcggggtctgcttgcctggcggcacttgggatccagggaggccccctgccccaccccgtcaccctcggagcctccctgaggcacctttccctctgcccccgctaggtactctggggcctcaagggcacccactgggagagcagagaggcccttgtccctgaactctgctggggcttttgaaccccaaatcccagagccctccaagggaggggccgggttggcacccccatggtcagaggccagaggggcccctccatggttctgggaattccagaggcttctggagagatgcttatccgtcccaccaggcccctgactgggaggctctgggcagtaaacacccccgtggggctgggggctggtttggggacacggaggaggggtggctgagtacaggcggaaggagtctcaggccggggctggggacttggcctgggtcctcgggtgggggtgaggtggtagcctgggatcccgggcagccagcagggactcggcccagcgtctgccggtggagctccgcccaggagcccaaggagctgagatgactcaagggtgactgcaaccctgagggatgggaaaaaggaacggggccctcccttctgcatggcctccttgtctgagtctcggccccacaagggaacctttgcccctcacatagagccaactggctgatgaggaaggaggtgtggcaccagggtccataaacccagtttcattctggtatcaacagagttcagggtgaggctgggaggagcaacccagggggcttcctgtaggagggggtgatttggagcaaagtctgaaaactggcttcagacacttgctctgtcatcgctgtgtgacctcagatgagcaggttctcctctctgggtcccagctccctctctcgaaaaccggagtcgaaaacggttccaaggtgttgcaggaagagtctcaggacgccgaggtccttagccaccgccgggccttgcaggggccatcttccgtcctggggctcttcccccgagggcagcgccgctgcccaagaatgccggccatgagagccgccgtggatccaggggtttttttggccgacacagtgaaaccccatctctactaaaaatacaaaacttagccgggcgtggtggcgggcgcctgtagtcccagctacttgggaggc[136 bp omitted]cacaggcagcaggggagggggcccagtggccttgaacccaagagctggaccccaggccccacccgctggcttcagtgaatcactggggaggaatgagcagaggaggatgcgtgccttcatccccacccaaccccgaccccactgggagacccggcacctgctcgaggctgggcggacagctccctttctcccggagttgacgtctgatgtgggttataaatcccgctgtgtaaacgtctgtccactcactgggcaaacattcctacacccgccctccccggggagctccagggtgcagggcgtggacctgcccagcccttcagggccagaaggcacggtggagccggtctgcattccgcaatgagcccgacccccacgtctgagcagctgggatgagtggtgtttgcccagccagtatttattaggcgcctgctgtataccagactctgggctgcaggaagggtgctgacctgtggccacagcaggcgagagcgaggcctgggctgacggtttcgggtgggagaaggcaaggccttccgtgagctgggcaggcggcgtccacggaggaggaggcctcgggtcaggggagccatctgtgcgtcacgctttgggaggaagctcagctgtttgtgtgggatttattcaccaatgccgcctggttttcaatgtttcccctattttagtttctgacatttgatacgcgcggaagattgcatgacacattgcgtgtagtttcaacacggctccccacggtctctccactttatgctgtttgatgccactttccagttcagagaggggctaagtttttctttttttttctttttttctttttttttttttttgaggcggagtctagctctgtcaccaggctggagtgcaatggtgcgatctcagctccctgcaagctccacctcccgggttcacagcattctcctgcctcagcctcctgagtagctgggactacaggcgcccgccagc[139 bp omitted]tctgtttaaaaacaaaaaaaaatgctgctggttggtgtaaaggcagcagatctaaataatagccttggtggcccgggagcgacagtcctgctttgtgggggtttgtttttcttttgagacagggtctttctctgtcacccaggctggagtgcaatggcacaatctcagctcaccgcaacctccacctcacaggttcaagtgattctcccacctcagcctcccaagtagctgggattacaggcctgagcccctgtgcccagccgacagtgctttttttaggagtcaggagctcaagcttttgagatccctgtgtcttcaggtgaggcttcctttcctcaactatgaaagatgatgtctgctggacacggtggctcacgcctgtaatccctgcactttgggaggccgaggcaggcggatcacctgaagtcaggagttcaagaccagcctggccaacatggtgaaacccgtctctactaacaatacaaaaattagccgggtgtcctggctgggcgcggtggctcacgcctgtaatcccaacactttgggaggc[269 bp omitted]tgcccgtagtcccagctactcaggaggctgaggcaggagaattgcttgaacccgggaggtggagattgcagtgagctgagatcacgctaccgcagtccagcctgtgcatcgcagcgagactctgtctcaaaacaaaagacaatacctaagacgggtgctgggtacaaggcctgacatgaaggaggtgttcagatgatggctctgggggaggggcaatctgggttacttcctggaggaggtgtccatgggcttcagcagaggaagccgtggagaagcagaaacaggcagcctcgagacagagagagctgcaggtagaggaggagggcgaggtttggggtggaggaagagggcctggtttggggtggaagaggagggtctggtttgggttggaggaagagggcctggtttgggtggaagaggagggtctggtttgggtggaagaggagggtctggtttggggtggaagaggagggcctggcttggggtggaggaagagggcctggtttggggtggaagaggagggcctggtttggggtggaagaggagggtctggtttggggtagaagaggagggcctggcttggggtggaggtgcccacagaaattggggtttcgtgctaaggccaggagcagggtgtgagaactgtgccctgcagatgccaggagccacagaagcgatgcgagcaggtgtgtgacctccgggaaggctcctggaactgagcccagcagcaacctggacccttgggagagggcgagagccggaaggcactgggtcagggtgtcacccgctcgctccacggccccacctgggcccagcgggacaaggtccacggtgttcctttgcccatcctggctttatggcgacaaggcccaggcggggatgttgtctcagatgggacgaggtgtccagctgggcagggcagggtggagaaccaggatgtgggagccgggaaactggagttgctgtcagtccttctctctgggcctcagtttctccatttgacatcccttagcaaggggccatctgtaattgtcagatggaaaaatcccacaccaggagtctcagagtgagctcagggtggaaaggctcagtgcacaggagacacagataaatatggtgcggccaaggaaggcttcagagatcaaggctgaggccaggcgcggtggctcacgcctgtaattccagcactttgggaggccgaggcgggcagatcacctgagctcaggagttcgagaccaacctggccaacatggtgagacctcgtctctactaaaaatacaaaaaattagccggacttgggaggttagcgcctgtaatcccagctactcaggaggctgaggcacgagaattgcttgaacctggaagcagaggttgcagtgagctgacattgtgccactgcactccaggctgggcaacagagcgagactccatctcaaaaaaaaaaaaatcaaggctgagctggactccacagggcaggtgtgtgtgtctgggagataaggtgggcagggcaccctgattttattgggctgcaaatgttagaaacatataatgcgagttgttggggtagtaaccgggacattcagagattcaggtatggttggaatcagggagcttaaaagttttcaggatgctttgctggtgttggggttgctgtcaagcaagctgtacccactgggggcatttacgtccccagcaattcactatctcattccatcagcctaacaagaccagcgggaagagggtcccatcttctgcattaattgtaaagtcccagggtctcatgtcattggctagactgggtcacatgctcatctctgaaccaattacagaggccagagggtgaaatgctctcactggctggactaggtcacttacccatctttgaaccaatcacagaggccagtgggtgggatgctctgattgatcaggatgagtcacttacccatccctgaaccaatcacagaggccagagaatgggctactctgactggccaggctgggccatttactcatccttgaaccaatcacagaggccagaaggtgggatgctctgattggccaggctgagttacttacctatcccttagccaatcacagagattagacaatgggctgctctgagtggctgtactgtgtcacgcacccctaaaccaatcacagaggttagagaatgggatgcactgattggctggactgtcacttacgcacccctaaaccaatcacagaggttagagaatgggctgctctgagtggctggactgtgtcacttacccatccctaaaccaatcacaaaggccatttgatggaccctttgccctttgggggactggaggctgttcctctccctaggtgctctgacttgatggccctcatttccttctcctccctcagtaagcccagaggtctccaccccacgggaggaaggctgaggccaagaccccggaagagatggaccgcgtgaccagataccccatcctgggcatccctcaggcacaccgtggcaccggcctggtgctggatggagacaccagctacacataccatctggtgtgcatgggccccgaggccagcggctggggccaggatgagccgcagacatggcccactgaccacagggcccagcagggcgtgcagaggcagggggtgtcctacagcgtgcatgcctacactggccagccgtccccacgggggctccactcggagaacagggaggatgagggttggcaggtttaccgcctgggcgccagggatgcccaccagggacgtccaacatgggcactccgcccagaggacggggaggacaaggagatgaagacctaccgcctggatgctggggacgctgaccccaggaggctgtgtgacctggagcgggagcgctgggccgtcatccagggccaggcagtcaggaagagcagcaccgtggccacgctccagggcactcctgaccacggagaccccaggacccccggcccacctcggtccacgcccctggaggagaacgtggttgacagggagcagattgacttcctggcagcgagacagcagttcctgagtctggagcaggcgaacaagggggcccctcatagctccccggccagggggacccctgcaggcacaaccccaggggccagccaggcccccaaggccttcaacaagccccacctggccaacgggcacgtggttcccatcaagccccaggtgaagggggtggtcagggaagagaacaaggtgcgtgctgtgcccacctgggccagtgtccaagttgtggatgaccctggctccttggcctcagtggagtccccggggacccccaaggagacgcccatcgagcgggagatccgtctggctcaggagcgtgaggcagacctgcgagagcagagggggcttcggcaggcaaccgaccaccaggagctggtggaaatccccaccaggccgctgctgaccaagctgagcctgatcacagccccacggcgggagagagggcgcccgtccctctacgtgcagcgggacatagtacaggagacacagcgtgaggaagaccaccggcgggagggcctgcacgtgggccgggcgtccacacccgactgggtctcggagggtccccagcccggactccggagagccctcagctcagattccatcctcagcccggccccagatgcccgtgcggccgacccagctccagaagtgaggaaggtgaaccgcatcccacctgatgcctaccagccgtacctgagccccgggaccccccagctagaattctcagccttcggagcattcggcaagcccagcagtctctccacagcggaggccaaggctgcgacttcaccaaaggccacgatgtccccgaggcatctctcagaatcctctggaaaacccctgagcacaaagcaagaggcatcgaagccccctcggggatgcccgcaagccaacaggggtgtcgtgcggtgggagtacttccgcctgcgtcctctgcggttcagggccccagacgagccccagcaggcccaagtcccccatgtctggggctgggaggtggctggggcccctgcactgaggctgcagaagtcccagtcatctgatctgctggaaagggagagggagagtgtcctgcgccgggagcaagaggtggcagaggagcggagaaatgctctcttcccagaggtcttctccccaacgccagatgagaactctgaccagaactccaggagctcctcccaggcatccggtgagaaggggctccagggagtggctgcttggctcagggtctcagaggttggagcaggggagggtggggaggtggagtttgaggctgtcaaagggctggggttggggagacattgcctcctgactgttcatcccctcagtcgctggtttgtctgcctgtctattaaaaatgtagattttggagagaaatgtcaactttaccttagggcttttgctttatggatttggatgccttgttgttaggcgcataaatgttcatatatgttttgtgt[137 bp omitted]tgcctcagcctcctgagtagctgggattacaggtgcccaccaccactcccggctaatttttgtatttttagtagagacaggtttcatcatgttggccaggctggtcttgaactcctgacctcaggcgatccaccctgccttggcctcccaaagtgctgggattacaagcatgagccactgctcccggcctgttcatatatgtttatcctcttggacagttgcacctttttgacaatatgaaatattccttgtgtcacttttaatgttttttttttttttttttgagatggagtctcgctctgtcacccaggctggagtgcagtggcgcgatctcggctcactgcaagctccgcctcccgggttcacgccattctctcgcctcagcctcctgagtagctgggactacaggcgcctgcctccacgcctggcta[176 bp omitted]tccagtttctcctgactggctactttggtcaatctgtcagtttcccggatagtcatctgctctgtctgtccatacatctgtctccttagctgctggctagagactctgtctcccgagcagaggtctgacaaatgttctaatgttctgccctccctgctcccctacaggcatcacgggcagttactcggtgtctgagtctcccttcttcagccccatccacctacactcaaacgtggcgtggacagtggaagatccagtggacagtgctcctcccgggcagagaaagaaggagcaatgggtgagtctggaacccgtctctgcagaggccaggctgaggtcagacagcccctattagggccacaggaagttcaagcaggactcaagcctgacctgggttcaagcactacccccacccctggccgtgcctcagtctcctgcagatgtcaggtagaagatgataaacttggtgtccttgtatctctgggcttctgcttggagaggccatataagctggggtctttgtccccatcaggaggtcatctccaggatcaaagaccaaaggaccaactctgcttggaggaggaggacactggcaatttgtcatcgtcaccagcattagtttctttttttttttttttttttgagacggagtctcactctgtcgcccaggctggagtgcagtagcacgatctcggctcactgcaacctccacctcccgggttgaagtgattctcctgcctcagcctcctgagtagctgggattacaggcgtgcaccaccacgcccggctaatttttttgtatttttagtagagacgtggtttcaccatgttagccaggctggtctcaaaccgatctcaagtgacctgcccacttgggcctcccaaagtgctgggattataggcatgagccactgcacctggccacagatatttacttctaagaaagagagagagagagagagaaggcaggagggagggagggatggagggaaggaaggaacaaagcgaggaaggaagggagggagggagagggagagacggagggatgtgtctgtcacacgctggctcggggcttccaatgaaccacacctttagcaccctggtggtctcacatgcccagggttaggcagctcatgaacccaggcttgactccaggacctacaggccacagagctttgccttaggggttttactttatgaattttgatgccttgttgttagacatgtaattgttcatgtatgtttatcctcttggatgagagctccttttgtcagtatgaaatattcctcacgtcacttttaatgacacgaggaatatttagtgccatgaggaatattatgtccttttttttttttttttttttttgagatggagtctcgctctgtcacccaggctggagtgcagtggcacgatcttggctcactgcaacctctgcctcccgggttcaagcgattctcctgcctcggcctcccgtgtagctggaattacaggtacgtgccaccactcctggctaaagggaggctgctagggaggctccatccgggaggtggaggttgcagtgagccgagatcgcaccaccgcactccagcctgggtgatagagcaagactcagacccaatataaataaataaattaattaattaaattaaataaatcatgaatgttggacagaggctgcactgaggggaacagcatgaggaacagcaagggggatggctgtgagtctgggtgatcgtgggacacgtgttgagaacactcagggcaggggatgccttccactcttccccaaatggtgacagagagggctgtgtgggagctctggtcggactctgcaccgggcagggcagaaaggcctgggctgacttgtgttcctttcctgtagtacgctggcatcaacccctcggacggtatcaactcagaggtgagtatgctcctgggcacgaagactcaagtctttcccccccacatctgtgcccctgcacacaggggccaacggaagccccttcctccaggtgtggggatcgtattgggtgtcttctcaattggtagtgtctgctcagggtggattttgctgtgatctgcttgtgatgtctgccatgggcatggattaggagaagagggttcacatgccacctctccaccacgtggtgaaggtttgtgaggttaga[147 bp omitted]ctgcctcagc[215 bp omitted]cgctctgttgcccaggctggagtggagtggcttgacctcggctcactgcaacttccgcctttcaggttcaagcgattctcctgcctcagcctcccaagttgctgggattacaggcacccaccaccatgcccagctaatttttgtatttttagcagagatggggtttcaccatgttggccaggatggtctcgaactcctgacctcaggtaatcctcccgcctccacctcccaaagtgctgggattacaggtgtgagccaccgcacccagccaaaggcactttctttgaggaaggtatgcatctgagactattcaagccaagccccctcagtcggtttatggcacacgtgtgtggccctcctttttatttttatttttttttatttttacttttttgagacaggctctcactctgtcacccaggctggagtgctatgatgtggtcccagctcactgcaaccttgacctcctgggctcaagcaatcctcccacctcagcctcccaagtaggaacataggaatgtgccactgcacccagatagtttatttttatttatttatttatttatttttgtacaggcagagtctcactaggttgcccaggctggtctcgaattcctgcattcaagggatcctcccacctcagcacaccaaatttctgggattataggcatgagccactatcgcctgacccctctttgagctgaatccgaaatgccaaatacattggacaggcacggtggctcacgcctgtaatctcagcactttgggaggccgaggcgggaggatcatgaggtcaggagatcgagaccatggtgaaaccccatctctactaaaaatacaaaaaattagccaggcgccgtagcgggcctctgtagtcccagctactcaggaggctgaggcaggagaatggtgtgaacctgggaggcagagcttgcagtgagccaagatcgcgccactgcagtccagcctgggcaacaaagtgagactccatctcaaaaacaaacaaaaaagccaaatacagacatttttcctgccctggagctcagcatgagttagcatattctttgatcatattactaggagtagagggtctgaaacagaggaggggatcctactttacccccgttctaggcctctctaatgaattggcagttggaggagacatcttgggggtgtggtaggacctggatcgggggaattcatgcctcctttttgcaggtcctggaagccatacgggtgacccgtcacaagaacgccatggcagagcgctgggaatcccgcatctacgccagtgaggaggatgactgagcctcgggatggggcgcccaccccctgccctgccctgaccctcgtgggaactgccaagaccatcgccaagcccccaccctaggaaatgggtcctaggtccaggatccaagaaccacagctcatctgccaacaatcccaccatgggcacatttgggactgttgggtttttcgtttccgtttctatcttcctttagaaatgtttctgcctttggggtctaaagcttttggggatgaaatgggacccctgctgattctttctgcttctaagactttgccaaatgccctgggtctaagaaagaaagagacccgctcctccactttcaggtgtaatttgcttccgctagtctgagggcagagggaccggtcaaagagggtggcacagatcgcagcaccttgaggggctgcgggtctgagggaggagacactcagctcctccctctgagaagtcccaagctgagaggggagacctgcccctttccaaccctgggaaaccatccagtctgagggaggaggccaaactcccagtgctgggggtccctgtgcagccctcaaacccttcaccttggtgcacccagccacacctggtggacacaaagctctcacatcgataggatcccatgaggatggtccccttcacctgggagaaaagtgacccagtttaggagctggaggggggtctttgtcccccacccccaaactgccctgaaataaacctggagtgagctgcctgccttggtccctgcctggtccggacaaagtcccctgggcctccactctctgtttcattttcttggcgacattaggttccaccccgctaggccgtgagcctgtggggctgtcaggttcccatgggggggttgccagcatctgcatgcagtaggtgcttagctgatgcttgttgagtgactgacaattgatcatggagaggcaccttcagcaacaccaggcccggggcccaacctcaccagcccggctcctccagccccgtctcaccacgtccatcgcagtacccagggtgcttattaagcatttgctgaatccctcaccactctggtctcagaggaggccggagggtcattaattcggctccgcatgtataccaggctcacatccagggaagccagatcctactggtcagaggcgtgggcgctggacccaagtcctggctctgctgcctgctgtgtggccttgggtgggggggggtcctctcactgccccatgcctcagtttccctctgacacacagggataacgataggaccaggctcccgggcagtaggagttaatttacgtaaagctctcggcacatggggaccattgacgttggattcagtgcctgatggcaggggcgtgtcctcagacaccccccaaagcaggcctcggcccccaggctcccccaaccctgctgggagcagcgggtgttaattacacctaggccagtgtctcctccttggctgctcagtgtccgctgcgctgcctcagggaaaaccgcgcagccacgccgggcccaggcaggcagatgtggaaccgaaatagctgggcagtgggggctgtggggaccctggggaggcgggggaagggggctgaggggctacatctgggcagagcagagactgagggaggagggagagcccctgtcttcagggagaccccagtctgatggaggaggcatctgccttcacagagatcccaggctgatggaggaggcccctgcccccagggagaccccagtctgacggaggaggcatctacccacagaggggccacagtctgacggaggaggcctctgccctcagggagaccctatctgatggaggaggcatctgccctcgggggaccccagtctgatggaggaggcaggttatgtgaccatagagggaggctcagtggccatagttggtgacttctttcatgtcggggcaattctattccaaccccaagaaccaaacgtggggcctgcgggaagggagggcctcacacacagtcctgggtgagtcccatcagtttctccactgtctgccaccccatcttcccccgatgccccatgttctgtccctctgtccctgtgctctgaggatgtgtgagcctccactggctactataacaaatcaccacccacctaatgacttaaaacagcagacatggttgggcgcagtggctcacgcctgtaatcccaacactttgggaggccgaggcgggcagatcacctgaggtcaggagttcgagaccagcttgaccaacatggtgaaagtccgtctctactaaaaatacaaaaaattagctgggcctggtggcaaatgccagtaatcccagctacttgggaggctgaggcaggagaatcacttgaactggggaggtggagattgcagtgagccaagatcgtgctattgcactccagcctgggtgacagagtgagactctgtctcaaaaaaaaaaggcaatctctccctgtctctctcaggctcaccttcctgcctcctctcgtgagggccctatgaggacactgggcctccatgtcacccaggatgttctcctgtctcacggtccattactcagtcccatctgcaggtgcttctgccacgagaggtgacacggccacaggtcccggggattaggaaagggatgtctttggggccattgttctgcccaccagaggatctcgacatcccccttctccgtgactcttcagtcacctctgctcagggccggccaggactgttgcacaggctgtgccctgcacaagccccctgccaagaccaaagggcaaggctctgtgtgcggccagggtccccgtcttcagtgtccctggccctggctgtggcctgttgccagacaccgcgtcaccaaggggtgcattattcccacatcatcccagttggacggtcacctcaccctgcccatcgtcctgccagcaagatggtcccacagcggcctcagttctcagaggctcggcagggtctcccctgaccccgtaatgcccctcactgcccctgggcgctgggttcaagaagaaccgcctgcttcgttgcaggaagtgatgtccacccccaactctggatcggaagccacgatctatcctccagacccaacaccaggtccccagccctttatctctcctgtctgtctgtccatttctggtgttcaggcctctctctccacgtctatctccctgtttctgtccctcctgacctctctctttttccatgatttttgctttcctccctccc[134 bp omitted]cccacctcagcctcccgagtagctgggattacaggtgcccgccaccacgcccggctaatttttgtatttttagtagagacggggtttctccatgttgggcaggctggtctcaaacccctgacctcaggtgatccgcccgcctcggcctcccaaattactgggattatgggcgtgagccaccacgcccggccctcatcctaaattcttaaaacctgctctcctctcagccatgattttctttgtcctgtgccataaagaattctcagaagcaggatgcagcttctgctgctcaagggtgagcccagccagtgggatctggtgtcgctgcccgcagacccctcagtcaagagcggggtggggggcagcaggagctacagtaacagcccggatggtcctgctcctgaaggcaccccaccctgctgtccagaggagagaccgaggctcagacatttgagccccacataacccagcctgccacacaccgcagactccaacagtgtagcccctgtaccccagaagtcacttcagcaaatcactcagggctccacctcacatctgtccccaagtccttggggacttgctcactcagcagaagaccaagagaagccagatgcagtggctcacacctgtaatcccaacactttgggaggctg[135 bp omitted]aggcaggagaatcctttgaacccaggaggtggaggttgcactgagccaagattgtgccactgcactccggcctgggcgacagaacaaggctccgtcctaaagaattaattaattaatttaaaaataaaaagaaaatgtgcactttcatcttgtattattctgtccttttgtttgtttgagataaagtttcgctccatttgcccaggctggagtgcgtgatctcggctcaccgaaacctctgcctcctgaattccagtgattctcctgcctcagcctctcgagtagctgggattacaggcccacgcccccaccatacccagctaattttgtacttttagtagagacagggtttctccata[137 bp omitted]agtcactcacacctgtaatcccaccattttgggaggccgaggcgggcggatcacaaggtcaggagatcgagaccagcctggccaatgtggtgaaaccctgtctctactaaaaatacaaaaattagccgggcgcagtggtgcgcacctgtaatcccaattactcgggaggctgaggcaggagaatcgcttgaacccgagaggcggaggttgcagtgagccaagatcgcgccacggcactccagcctgggcgacagagcaagactgtgctcaaaaaaaaagatttagtttaattcctgtaatgagtcagccccttggaaaatcagacagaattctgcctgctgagcagacacattccagaagttactctgtgagaggtttagacgaattcctagtgaaatttccaggggcgggagagcgtgtctggaaggtctgcggacatcacagcaatcacagaggcctttggggcgggcaaaactgtccgctggcgctcgctgctagcaggagggagttcatattctttcctggtttcctcctggctcagtgtatcatgatatgccagggaaaggaggagaattctcttttttgtttgtttggttttttgagacagagtctcacgctgttgcccaggctggagtgcagcggcgcaatctcagctcaccacaacctctgcctcctgggttcaagcgattctcctgcctcaacccccggagtaactgggattacaggcacccaccaccacgcctggctaatttttgtatttttagtagagacggggtttctccatgttgggcaggatggtctggaactccagacctcagatgatccacccgcctcagcctcccaaagtgctggggttacaggcgtgagacactgcacctggcctcaactccattttaattaaccctgcaggggccaggcatggtagctcatgcctgtaatcctggcattttgggaagctgaggcaggaggtggatcacctgaggtcaggagtttgagaccagcgtgaccaacatggtgaaaccctgtctctaggaaatacaaaaaattagctgggcgtggtggcaggtgtctgtaatcccagctactcgggaggctgaggcaggagaatcacttgaacccaggaggcaaagatcgtggtaagccgagatcgcaccattgcactccaggctgggcaacaagagcgagactccatctcaaaaaataaaaataaataaataaaaaataaataaaaataaaaaaaattagccaggcgtggtagcgcgtgcctagtcccagctactcaggaggctgagacacgagaatcacttaaacccgggagatggaggttgcagtgagctgagatcgcgccactacactccggcctgggcaacagagcaagacttcgtctcaaaaataaataaataaataaataaataaaataaagagatttaggagaggacacaagcaaacataactcagactgactttggcaaaactaggctttatgggttcccgtaactgaaacatcaatgtagggccagcttcaggctcagctggttccaggtgccacacagcatcctcaggttccttcggtgttgggagctcaggctccaagcccaggacagattcccagctctgccacatgcccctgagggaccctgggcaaggcctacccctctcccagcctcagtgtccttatctgtaagtgaagtcgccacattgacatccctgccctgggggacgtcatgag[138 bp omitted]tggctaacatggtgaaactccgtctctactaaaaatacaaacaattagccgggcgtggtggtgggcgcctgtaatcccagctactcgggaggc[144 bp omitted]caagtaaattaacgaattgtcaccagacaatgacttccatgtgactttctggtgtgagccggagaggagccgatgcacgctgccaccagagggcggcaaacaccaaggatgcagccgcggccctcgccccgccagggagaaaacgcacctgccgccactctcaccttctcattcccgta[131 bp omitted]ctggccaacgtggcaaaaccccgtctctacttaaaaaaaaaaaaaaaaatagccgggtgtgatggcgttcacctgtaatcccagctactcaggaagctgaggcaggagaattgcttgaacctgggaggtggaggttgcagtgagctgagattgagccattgcactccagcctgggtgacagaggaagactccatctaaaaaaaaaaattatttgtagagatgacagagtgagactccatctaaaaaaaaattatttgtagagatggggttctcaccatgtttcccaagctggtcttgaactcctcaagtgatcctcctgcctcatccccacaaagtgctgggattactggtgtgagccatcgagcccagccctgaccaac[132 bp omitted]aaccctgtctctactaaaaatacaaaaaaattagccgggtgtggtggggggcacctgtagtcccagctactcaggaggctgaggcaggagaatcacttgaacctgggaggaggcggagcttgcagtgagccgagatcgagccactgcactccagcctgggcgacagagtgagactccgtctcaaaaataaaaataaaaataaataaataaaattagccggaagtggccgagtgcggtggctcttccacagcagccagagggcgcctgtgaggctgactgggggtgtccctgctctgcccacagccctccatggctcccatttccctctgggtagaagcccaagtcctccgtgcagcccacaaggctctgcccagtcccctctctcctctccctcctctgtctactctccctcctccctgtctccccctcctcctctgcccagtcccctctctcctctccctcctccctctctcctctccctcctccctccctatctccccctcctcctctacccagtcccctctctcctctccctcctccctatctccccctcctcctctacccagtcccctctctcctctccctcctccctttctccccctcctcctctacccagtcccctctctcctctccctcctccctgtctccccctcctcctctgcccagtcccctctcctctccttcctccctgtctccccctccctcctccctgtctccccctcctcctctgcccagtcccctctctcctctccctcctccctgtctctccctcctcctctgcccagtcccctctcctctccttcctccctgtctccccctccctcctccctgtctccccctcctcctctgcccagtcccctctctcctctccctcttccctgtctccccctctgcccagtcccctctctcctctccctcctccctgtctccccctcctctgcccagtcccctctctactctccctcctccctgtctccccccttcctctgctccagccacacgggcctcctccctgttcctccaacttgccaggcggggtcctgccccagggcctttgcctccccaggtgaggtccggccccagggcctttgcacggccatgtcctctgcctggtttcccttccctaggtacccactgggttcatttcttcacttctttcaaggctttggtgaacgctcccctcatcacacagctgttgctcagtaaatatggcagaataaatagctgggcagggctcagtggctcatgcctgtgatcctagcacttctggaggctgaggcaggaggctcacttgagctcaggagttggagactagcctggccaacgtagagagactccatctctacttagggtgaccaggggagagaacaaaatcatgggctcattttttttttttttttgaaatggagtcttgctctgtcgcacaggctagagtgcagtggtgagatctcggctcactgcaacctccacctcctgggttcaagcaattctcctgcttcagcctcctgagtagctgggattacaggcacatgccaccacacccggctaattttgtatttttagtagagacagagtttcgccatgttggccagggtggtctcgaactcctgactgcaggtgatctgcccgcctcaccctcccaaagtgctgggattacaggtgtgagtcactgcacccagcaaaaaatgtttattattcccatttcacagaccagcaaactgaggcccagagggagccgcctgaggaaactggattgcgcagctgatggagtctcaaccagagaaggggcccgtggggcctagattcagacttccggctgtgcaggcaagcaggagggccccccagtcagggtccccaggacaccaaccccaagccaaatgaggccaccagaggctgtgcccagccccagtcccgcacggggcaggtgtggagcaaatgctggcgggatagagggatggagaagggggctgcctgggagtgaggggctgggtgccccacccacctggcctcagcctcctgccctatccgagaacagagctctggtttcctgcccggcagcccgtgaggagcagcgaggcatggccagctgggggccggacagtcctgaagagcttgaggactggctcctggctcctaaagcatagcgccggctctggggatctgccagggagagaccagctccagggcccctggatgcaggttagagctcaggctgtcccctgatggcctcggtgctatgggtgagtttctccacctctctgtgctcagcctctcaccggagagggggtgggtgatcctggcctgagtaggtgaccaaggcatcctcctctgtggctggtatttcccaacaccctcaataaattcacaggtggctcaggcctgtaatcccagcactttgggaggccaaggcaggcagatcacctgaggtgagcagtttgagaccagcctggccaacatggtgaaaccttgtctctactaaaaatacaaaaattagggccgggtgccatggcacatgcctgtagtcccagctactcgggaggctgaggcaggagaatcgcttgaacccgggaggcggaggttgcagtgagccaagattgtaccacttcactccagcctcagcaataagagcaaaactccatctcaaaacaaaataaaaaataagggcgcagtggctcatgcctgtaatcccaacactttgggaggccaaggcaggcggatcacaaggtcaggagattgagaccatcctgaccaacatggtgaaacctcgtctctactaaaatacaaaaaattagctgggcatggtgacgggcgcctgtaatcccagctactcaggaggctgaggcaggggaatcgcttgaacctgggaggcagaggttgcagtgagccgagatcctgccactgcactccagcctgggtgacagagcgagactccatctcaaaaaaaaaaaaaaaaacaaaaacaaattggtttgtttattttcctgttgatttgtgggagttctttatatattctggacctgagtccttgattacattatgcactgctagctagtaccttctcccagtctggcactttccttttgagtcttcttctttttttttttttttttttttttttctgaggcgcctgccaccacacccggctaatttttgtatttttagtag[143 bp omitted]caaactcatttgttcaaaataaaatgcaatttttttttttttagatggagtctcactctatcacccaggttagaatgcagtgggacaatctctcccaggctcaagcgtctcttctgcctcggcctcctgagtagctgggattacaggtgggtgccaccacgcccagctaattttgtgtatgtttagtagagaccaggtttcaccatgttggccaggctggtcttgaactcctaacttcgagatccgcctgccttggcatcccaaagttctgggattacaggcatgagccactgtgcctggccatgttaggatatttctttttttcttttcttttcttttctttttttttttttttgagagtctcgctctgtcacccaggctggagtgcagcggagccatctcggctcactacaagctccgcctcccaggttcatgccatctcctgcctc[224 bp omitted]aaccctcaatttgaggttgcaaaccctgtttcctgctaagccagacagatggtgctggagatggggaggccatggtttatgttttgtccactctgggtgctgcctggacaggtgactcatgcatgtggcggagcagtccagagtgaggactgtacccctacagacactcccccagaccatgctggtggcctgagctgggggctgcccaagtcccctccccgggatccacttctggggcctcccaagccttccctggggtcagtgagtgctggaagggcagccagcagtgtgtgtccacgggggggggcgggtcaccacttatctgggcattaaatatttgggggggtctcaaaataatggaaaacagggggccagaagtggtggctcatgcctgtaatcccaacactttgggaggccgcagtgggaagatcgcctgaggtaaggagttcaagatcagcctgggaaacatagcaaaaccctgtaatgaaaaacccaaaaattagcccggcgtggtggcaggtgcctgtgatcccagctactcgggaggccgaggcgggaggactgtttgagcccaggaggttgaggctgcagtgagctatgattgcaccactgctctccagcctggacaacagaacgacccactttctcaaataaataaataaataaatacgctgaggccaggcgcggtggctcacgcctgtcatcccagcactttgggaggccgaggtgggcggatcacgaggtcaggagattgagaccatcctggctaacatggtgaaacccccgtctctactaaaaatacaaaaattagccaggcgtggttgcgggcacctgtagtcccagctactcgggaggctgaggctggagaatctcttgaacccgggaggctaaggttgcagtgagcccgagatcacaccactgcactccagcctgggtgacagagtgagactctgcctcaaaataaataaataaataaatattaaaataaatagggcc[178 bp omitted]gaggcaggagaatggtgtgaacccgggaggcggagcttgcagtgagccgagatcgcgccactgccctgcagcctgggggacacagcgagactccgtctcaaaataaataaataaataaataaataaataaaaataaaataaaataaaataaattaattaattaaaatagagatgagatctgcctctgccgcccaggctggagtgcagtggcgtgatcatagctcaccgcagcttccaactcccgggctccagcaatcacaggacaaacctcccgcccggccctgcagccaggtgctcacaccagccctatttataacaggaatccatggaaatttctggccccaccaagctgctgtcatgaataagtcatcgtccggatcaatgattccacccagggagcatctgcaagtttccacctcgttctccctgggccccggacagcctggctgggacgtcagagctaccagtcaggctgcggaaacagcctgggggttcctctgtgaccaaaccattccacgccgtggtctctacccagagaaaggaaaacacaggtccatacgcgtgttcgaggcggcatgattc[158 bp omitted]ccgggcatggtggcaggtgcctgtaatcccagctactcgggaggctgaagcaggagaattgctctagccagaagggtggaggttgcagtgagccaagattgtgctgctgcactcagcctgggagtcagagcgagcaagactccgtctttaaaaaaaaaaaaaaaaagaaaaattcagccgggcgcggtggctcacacctgtaatcccagcactttgggaggct[133 bp omitted]tgaggcaggagaatggcgtgaacccaggaggcagagtttgcagtgagctgagattgcaccactgcactccagcctgggcaacagagcgagactctgtctcaaaaaagtaaaaaaaaaataaaatagatgtatataaaatatataaataaatatatataaatatatatataaatatattttttcttttttttttggatggagttttgctcttgtagcccaggctgggtgcaatggcgtgatctcggctcactgcaacctctgtctctcgggttcaagcaattctcctgcctcagcctcccaagtagctgggactacaggcgcccgccaccacacccagctaatttttatatttttagtagagacggggtttcaccgt[138 bp omitted]tccttttagccccagataacattccattctcgatgtttatctgctcgcctgccgaaggacgttttggtggcttccagggctgggctgttatgaatagcagagctgcaggccgggggcggtggctcacgcctgtaatcccagcagttcaggaggccaaggtgggagggttgcttgaggccaggcaatcgagaccagcttgggcaacacagcaagaccccaatctctaaaaaacatacaaaaattagccaggcatgatggtgcacacctgtggtcccaatggttccagccactcaggaggctgaggtgggagaatcacttgagcccaggaggtcgaggctgcagtgggctatgactgcaccattgcacctcagcctggacaggaggacaagaccttgtctcaaaaaaaaattttttttttgagagggagtctcactctgtcacccagggtagagtgcaatggtgagatctcggctcactgcaacctccacctcccgggttcaagcgatcctcctgcttcagcctccagggtatctgggattacaggcgcctgccaccacgcccagctaatttttgtatttttagtagagatagggttttgccatgttggccaggctggtctcaaactcctgacctcaagtgatctgcctgcctcagcctctcaaagtgccgggattacaggcgtgagccaccatgc[134 bp omitted]tgtctctgctaaaaacacaaaaattagctgggcgtggtggcttgtgcctgtaatctcagctacttgggaggctgaggcaggagaagcgcttgaacccaggagccggaggttgcagtgagtcgagattgtgccactgtgctccagcctgggcaacagagcgagagttcgaatcaaaacaaacaaaaaaagccacaggcggccacacatagaccgtcactgacctcctggagcttctcttctcagggaaaggaacttccagactcagaaaactggggcaggaaacatccaggccagtttttccagcccaccggatctcaggcagcttccaggaggattgcctgaactcgctgaaattgcccaattccctcctgggcacatggttttcagatgatgaacacacaccctgcaccggggctgaggcctcaccctggcgtttgaatcctgggccccgggtttagtccacaggaggagaagccacactggctgctgggagggaatgggaagcgggcagccgccgtggaaaacatggatcagtgcttcagaaagccagacagcggcgccgtctaaccccaccgtgcggctccgaggaatccaccccagataaccgaacacagcggctctcaataaacatgttcacagcagcatgagccacgggagccaggggtggacggaaacagtggcacgagccacaggagccaggcgtggaaggaaacagtggcacgagttacgagagccaagcgtggaaggaaacagcagcatgattcacgggagccaggcatggacggagtccacaggagccaggcgtggaaggaaacagtggcacgattcacgggagccaggcgtggatggaaacggagaggagcagagagcaaggctctgacgccagccacagcgcagatgcaccctgaggatgtagggctcagacggatgcccgacacgaaaggccacacagcgtgtgatcccatttccatgaaatgtccagggccag[138 bp omitted]tggcgggcgcctgtagtcgcagctactcaggaggctgaggcaggagaatggtgtgaacccaggaggcgcagcttgcagtgagccgagatcgcgccactggattctagcctgggcgacagagcgagactccatctcagaaaaaaaaaaaagaaaagaaaagaaaaaggaaaaacagaattaagcattgtagtgaataattcagtgggatttggtgccttcacggtgctgtgctgctgtcacctctaattccaggatattcccatcatcctttgtggttggggcatcatctgtcactccccatcccctccccatccctgagaatccatgcatccccttcctgtctctgtggcttggtctgtctgtcctggacatttctttttttctttttgttgtt[137 bp omitted]tgcctcagcctcccgagtagctgggactacaggcgcccgccaccacacccggctaattttttgtatttttagtagagatggggtt[132 bp omitted]cttgctatgttgccacgctggaatttttttttttgaggtctctctgtgttgcccaggctggagtgcagcggcacgatcttgacccaccaaaacttctgcctccctgcttcaagcgattctcccacctcagcctctggagtagctgggattacaggtgcccgccaccacacccggctaattttgtatttttagtagagatggggtttcatcatgttggtcggggtggtcttgaactcctgacctcaagtgatccgcccgcctcgccctcccaaagtgctgggatgacaggcgtgagccaccgtgcccggctgcccacactggaattctatgttataggaacttcatctcactgaaagaaaaaggggactcctggatgggtcctgaatttagacatttatttgttcatgaaacaaacgctgatggggccgttgcacacccaggtctgcactggccgccctgtggggccccggaggggcgggggcagggagaggccgcctgagaggcagtggcccgggtggaggacccagggctgggcctggcgatgctccgactgcagcttccggagaacaatctcaggtccacaatgtggagacgttggcagatgctcctgctgaggaccgacagacatcatccccgcttcatcctgctttttcctcccatgaggaggtcaaagtcacaccgtggggccaggcccggtggctcatgcctgtaatctcagtactttgggaggccaaggtgggcagactgcctggacccaggagttcaagaccagcctgggcaacatggtgaaatcccatctctactaaaatacagaaaattagctgggcgtggctgggcatggtg[131 bp omitted]ggcgtggtggcaggcgcctgtggtcccagctactcaggaggctgaggcaggagaatggcctgaacccgagaggcggagtttgcagtgagctgagatcacgccactgcactccagcctgggcgaaagagtgaaactccgtctcaaaaaataaaaagaaaagaaaagaaaagaaaagaaaattaggccggtgtggtggcacacacctgtagtcccagctgctcgggaggctgaggcaagagaatcgcttgaacccgggaggcgagggttgcagtgagccgagatcgcgccactgcaagactccgtctcagaaaaacaaagtcgcacaggagagtcacgtccaccccctgggccaccggacagtcgccacagaccaggcagctgaatccccgctctacagacaaccccatcaaggctggggcagtgagacgctctgaaggccacaggcccccaggatcccaccccgtccgtctctccctccctgctgtccctctgtgagccacaccctgcggctgtcagcggcagtgatgggggctgcaggggctggggacagagggggatgagtttccagccaggcggcctgggagggtagctttaatccccacctcggttttgtcttagaagcagttgcatggctgtgctccaggccgtccagggttcaggctgagccaccgtctaggtctagacgtcagtgtccatcaggacctggcgtgccctgcaagcagacatgtgctccttcgacctccgtcaaccctggagatgaagcagggaaggggccctggctggaggcttggacatccatccggaggggcggagtggcctcgaggcggtgtgtgagtccccggggaagatgcaggggacgctgggtggccggtggcacgagtgaggctcggggtcccgcagccccccgtggtgtgggtgcctgagttggggggtcctcgaggaggacaagggagggaactgaagggggccaggacacccggtagcttggctgccgggggctctgtgatatgctaagtccctcctgctcaccactaaacccaagaggaaaaggaattcctggcagagtccaatttaaagtcaacaaacaaacaatgtgggaaggagagaaggaatcccaggaatgtgggcgaggtcctcctcccgccggggccaccctggacccggcgagaaatcgaaggtcccccaaggacccacgtccaggagccaacagcctctctgtgcaaaccagacaaccctgcaggaactgtgcttgaagaaaccgtggaaactgcccccaaccctcccgtctctatttctttctctgttttattatctcattcttggctgtgaggtaaacaggagaaaatgagaaggtggttctggaggacccgaccgaatttgctttcgtgacagggtcaagcgccctttcctcgccggccgcagccctcaccaaaggggatttgggggcctccggacaggggtcctgaaggttttgaattgttcaatctctgggggtacaggaacccctgcaggaggtttcaaaggcaagagtttcgcagagagaaaaaaaccatgaactttgcaggttggtggcggaatctggtgatttaagaaaacgtgtttaagcctcggccgggccgcgcctgggctgtctgcggtgctcttccggaattctctacaatatctggaagtgaccaagaaaattccagaacccggaggctgcgccgtggagataaacatgggcacctgggtatgtttgtttttattgttaggacctattttatcacaagcaaaaaaaaggaagctgcccagaaatccaggggtgatggatagaaggcgatggggcctgcagtggcccaacggattctagaattttcctctaggaagatgcccgggaattttaaccctgttggctcgacccagaagctcggggtggcagggaaaggatcactgtggccttccttccttccttccttccttcctggaatttcgctctgttgcccaggctggagcgcagtgacgtaatcatagtttgctgcggccctgaccccaatggcacaaatgagcctcctgcctcaatctcctaagtagctgggactacaggcatatgccactacgcccggctaaattttttttttttttttttttgagacagagtttccctcttgtcgcccaggctggagtgcagtgtcgcaacttcggctcaccacaacctccgcctcccaggtggaagcgattctcctgcctcagcctcccaagtagctgggattacaggcatgagccaccacgtctggctaatttttgcatttttagtagagacggggttt[141 bp omitted]ctgtgtcacccaggctggagtgcagtggcaagatcacatcccactgcagcctcgacctcctgggctcaagtgatcctcctgcctcagcctcctgagtagctgggaccacaggcatacgccagcacgcccagctaattaaaaaaaaaaaaaaaaaactttagcagccaggcacggtggctcactcttgtaatcccagcaatttgggaagctgaggcggacagatcactagaggtcaggagtttgagactatccctgtctctactaaaaatacaaaaattagccaggtgtggtggcgcacatgtaatcccagctactccggaggctgaggcaggacaatcacttgaacccgggaagcagaggttgcagtgaggtgagatcgtgcccctgggcgacagagggagaatccatctcaaaaaaaaaaaaaaaaaatttccggatggggtctcgccacgttgcccaggctggtcttgaactcctgagctcaagtgattctctcacctcgacatcccaggttggtggattacaggcgtgagccacagtgcctggccctggcttttcttcttgtttgtcaggctctgctgttgtgataggaaggcttgaggacttcaaaggggcggctggtgtgcggggttggggacgatggcagggacaggagggaggtgctgttggcatgtgtggaatgtggcattggcgctggatggacgggtctgtgtgcgctgactgcgtgtccgatgccagggcctgtgttccccctgcacgtccccaggaaggaactgctggaccagcagaatgaggggccaacgccaggggcagcactgcccggccacagaggactgtggccccacagatgacaccctcagctaccagctcctgcatctggaagatgaccaggaggaggaaggacggtctgcaagtgttcaaagtgatgtttccaggccgggcgcgcttgtaataccagcatttgggaggctgaggcaggcggatcacctgaggtcgggagttcgagaccagcctgaccaacgtggagaaaccccgtctctactaaaaatacaaaattagccaggcgtggtggcgcagctactcgggaggctgaggcaggagaatcgcttgaacccgggaggcggaggttgcggtgagctgagattgtgccattgcactccagcctgggcaacaagagtgaaactccgtctgaaaaaaaaaaaacctctataacatccaaaatactaaccacttgttacctctagattgtttggggatgttagatttctcctttgttgccagctcttttatttttatttatttatttattattattattattattattattattattattattttgagatggagtcttgttctgttgcccaggatggagtgcagtggtgtgatctcggctcactgcaacctccgcctcctgggtttgagcaattctcctgcctcagcctcccgagtagctgggactacacgcgtgtgccaccacgccaggctaatttttgtatttttagtagagacggggttttgccatgttggccaggatggtcaggaactccccaactcttatttttaaatgttgggccacacaagtctgggaaatgttagttttcaaacacatcagggaataaatggatacaaaagtcttgaggaccacttaagaaatgaacaatagcagatgtgtaacagttatactacgctgctaccttgtaaaacattttagaaacatctgtttccagccgggcctggtggctcacgcctgtgataccagcactttgggaggctgaggtgggcagatcatgaggtcaggagttcgagaccagcctggccaacctagtgaaccctcatctctactaaaactacaaaaaattagccaggtgtggtggcgggcgcctgtaatcccagctacttgggaggctgaggcaggagaatcgcttgaacctgggaggcggaggttgcagtgagccaagattgcaccactgctctccagcctggcaacaaaggaagactccatctcaaaaaaaaaaaagaataaaaagaatacaaaaagaaaaaaaaaacatctgtatcatccttgtagattctggggtttggaaacaggctttgaaaaaagtcctgaaacaggccgggcgccgtg[319 bp omitted]aatggagcaaattttgaacagcttgaatacctgagacaggccaggggtgcggggcaggctcattttatattcttcacggttgtgtgaatttcttgcaattatatgtagcaattttttcaccaggatttagtatattagcatgtttcgggctgggcacggtggctcacgcctgtaatcccaacactttgggaggccgaggcaggtggatcactaggtcaggagtttgagaccatcctggccaacatggagacacctcatctctactaaaaatacaaaaattatctgggcgtggcggtgggcgcctgtaatcccagctacttgtgaggctgaagcaggagaatcgcttgaactcgggaagcggaggttgcagtgagctgaaatcgcaccactgcactccagcctgggcaacagggcgagattccgtctcaaaaaaaaaagaagcatgtttcctagcaagccaattcagaataaaaagaaaacaaaggagaaaatataatcccaataaaatatattgaaataaatatgtacacacatatatatatgtgagtttatgctttgttttgttttgttttctggaagacggagtctcgctctgtcacccagactggagtgcaatggcgtgatctcagctcactgcaacctctgcctccctggttcaagggattctcttg[134 bp omitted]ctgctatttatttattctgggttttttttattcttttttgttgttgttttcattttatctttcttttcctatttatttagagacagggtttcgccatgttgcccaggctggtctgaactcccggactcaagccatctgcccatgccggcctcccagtgtgctgggattacaggaggaagccactgtgaccagcctgaaagtgttcatttttaaatttttaatagagatggggtctcactatgtcacccaggctggtccgaaactcctgggctcaaaccatccgcccacctcggcctcccaaagtgctgggatcacaggtgggagccacgcgcccggccccaaagccctccttgcacaagcacctgagccgccatggcccacaggcccatcaaaaccagagcaaactggtacctgtgatacagcctccactccagccccagggcccagccccaggccacccgagccggctgtgggtgacctgagaccaagtgtcgtttcctgctataaactattgatgcctgagcagtcacctccaggagctccgggcttggctacggtgtcctgggttccctgtaatgaagcccggggcagctgcggcctggagggcgtctgctccgcctccatcctgggcccgcctggggctcttttccttctaggcctggttccctccaaaattagcttcctatcgggatcccacatcccctcacaatggaggcctgacctctggggagacacaatgtcagggtcactgtgaggtttttatttatgtacttttatttttatttatttgataccgagtctcactgtgttgtccaggctggactgcattagtgtgatcctggctcactgcaacctctgcctctcgggctcaagcgattctcctgcctc[135 bp omitted]agcctcccaaagtgctgggatgacaggcgtgaaccaccgcgcccggcctcgatttactcattttttttgagagagagagagagtctcactctgtcacccaggctggagtgcagtggcgtgatctcagctcactgcaacctccgcctcttgggttcaaataataattctcctgcctcagcctcccgagtagctgggattacatgtgtatgctaccacacccagctaatttttatatctttggtagagacaggcttttgccctgttggccaggctggtctcgaactcctgacctcagggcatccacccgcctcagtcacccaacgtgctgggatcacaggcgtgagccaccgcgcctggcctgactttattattgttttacaaagagcagaccttccacctgccatggataaaacgccgagttctagaggacactggagacagagtgttccccagaacaaggcctgggcgcagcagcctgcagggctggggtctccactcccgggggagcgtgcagcggggcctgccatccctctgtgcccccgccccacccccactctgcaggccgctgaccctgtggtcgggctggtgagcagatggctgctggatcactgacagcccggctcacgttccctctccctatggagacatcttccttttaataaattttgcaaggccgtggaggggggccagcgctctggcccacgtctgtctcccatccccatcaccacacgaggccccagcacgcctggctggcctaagtccccgcaggatgaatgggcttccggggcctgctgggaccaggtaagcaggctgtgcggcttaaaacaacacaaatacactctcgtctctggaggccggaagtctgaagtgaaggtgtgcaaggtgccaggcgagtaccctcccggcctcttccagctcctggtgccgacagccacctctgaccctcctggacttgcggccgcttccctcccaattctgcctctgctgccccacggcggtctcctctgcatctgtgtccaaatttcccttgtctcccgaagtcgcctgtcactgcggtggtgcccgccctaatgatctcatcctaactaattacatctgcagaaaccctatttccacataaggtcccatttgtaggtgcctggggttcacgcaaagacagatctttgagggaactcaattcaccccaccccggggagtttgcctttgtggccggcccttccccctcagatcaaattctgcctcctcagcgaggccttcctgaccctcccgggcccttcctgcctttctctctggctgcggctgtttcctgcggggctggctgcagctcccggcggcgccctgtcctgtacctgtttcatgtccatcgtcggcaacccctggcttctaacacagctcattgcccgcaggacctcccagcaggagcagggacccagtaggccctgcgtctccgtccgaaccacaagctgctgtgggtggtcacttgacagaaagacccctgcccccccttccttatttgtttatttgctttttctgttgctttagagactggattttgccctgtcatccaggctggagtgcagtggcgaaatctcggttcactgcagcctccatctcctgggctctggtgagactacggccttagcctcctgaatagctgagaccacaggcgtgcaccaccacgcccagctgattctttgacttttgtttatacagggttttgccatgttgcccagggtggtttcaaagtcctggcctcaagcaatcctcgtgcctcgccctcccgaagtgatgggattataggcatgaacaactacccacttcactccatcctttcctttttttttttttttgagacagagtcttactctgtcaccaggctggagtgcaatggtgcgatctcagctcactgcaacctccgcctcccaggttcaagcgattctcctgcctcagcctcccgagtagctgggattacaggcatgcaccaccacacctggctaattttgtatttttagtagagaaagggtttcaccatgttggtcaggctggtcttgaactcccgacctcaggtgatccacccacctcagcctcccaaactgctgggattacaggcatgagccaccacacccggccgagacagggttttcaggcgatctgcctgcctcgggctcccgaagtgctaggattacaggcgtgagccactgggcctggctttatttaattttttgagatgggatctcactctgtggcccaggatggagtgcagtggtgggatcccagctaactacagccttgaactcctggcctcaagggatcctcccgcctgggtttcccaaagggctgggaatgacaggtgtgagcccccacccccctggcctggatatttcatagaaatgggatcacacggggccaggcgcggtggctcacgcctgtcatcctagcactttgggaggccgaggcgggcggatcacctgaggtcaggagtttgagaccagcctggccaacatggtgaaaccccatctctactaaaaatacaaaaattagctgggcttggtggtgggtgcctgcaatctcagctccttgggactctgaggcaggagaattgattgaaccaggaggcagaggttgcagtgaactgagatcgtgccattgcactccagcctgggcagcaagagccaaactctgtctcgaaaaaataaaataaatgggatcacacgctgtgtgtccttctgtgtctggcgtctctcacggagcgtgacgtccttaaggtgcatccgcgctgtggcctgggtcagagcctggatccttttcacgctgagttgtgttccgcggtggacggccggcactgggttggtcttttcttccactaacgggaatttgggctgtttccacatgtggcctccgtgaataacactacgatgaacgttcatgtacgcgtttctgtgtggacttgtgtttccccttctctcaggggcatgaataggaggagaattgcggggttcctgagggccggcccccagtgctggcacatccccaagccaagccccacccctcttttttttttttgagacagagtcttgctccgtcacccatgctagagtgcaatggccccatctcggctcactgcaacctccgcctcctgagttcaagcaattctcctgcctcagtctcccgaggagctgaggttacaggcacccaccaccatgcccagataatttttgtttttttagtgggagacggggtttccccatgttggccaggctgatcttgaactcctgatctcagggatccacgcacctcagcaccctctttggaagttcctagcaagttctctgcctgagttcagacccacagggcctcttaggggacgggggagggtcagggcccagctctagctgaactcccccggggggaggggggaggggggaggctcaggacccagctctaggggggattgaggaggatcagggcccagctctagctgaactcccctgggggtagggaggagggtcagggcccagctccagctgaactcccctgggtggggtggggaaagagggtcaggctggggaggggagcacagaatggcggggtgccaggcctgggggagaggcggatggggtggggaaggatgggtctgggcagataacgctgtggccttttcctgttggcctgagggcccagggtgggggtggggagaggctggtctccctgaggtctgggcatagggaggtgtcctgggatgagaagactcttgagaagtgactttgataattcgggggcagatccttgggcccaccaccccttgcagggacaggggtccttcttggggtgggggatgaacagagactggagagggtgggggagaaaggagttgaggggctaatttacaggacctctcaggccgggtgtggcagctcacacctgtcatcccagcacactgggcagctgaggcaggaggaccccttgagcccaggagtttgagaccagcctgggtaacacggtgagattctgtgtctacaaaacattttttaaaatgagccaggcgtggtggaactacttgcttatagccccagctaccgagaggctgaggcgggaggatcacctgagctggggaggttggggctgtggggagccgagactgtgcctctgcactccagcctgggcaacagagtgagaccctgcctcaaaaaaataaataaacaaaaaataaataaagcccccattccctttaggatctctacttcctataccaacccactgtcccagcttggaggggcgggaccagcctcgagccgcagttgattcccagagcacagagcacaggacggaagtggttctgcatggggtatagtgaggccagggaatagcaatgcattcctgtccgtgagtcctggccatcaggccttggggtggcctcaccgaacccccactccaagctccgttcaacagaaatccaggaaatgggccggagaggctgggagaccacccaggagaccagcccgaggccgcgccctggatccctgagccctcacttttgtaattaagataataaacctgtgctggctgtgcgggcacacacctgtcatcccagcactttgggagaccaaggcgggcagatcacctgaggtcaggagttcgagaccagcctggccaacacagtgaaaccccatctctactaaaaatacaaaaattaggctgggtgtggtggctcacaggtggattacagggtggcctgtaatcccagcactttgggaggccaaggagggcagatcacaaggtcaagagatcgagaccatcctggccaacatgctgaaaccccgtctctattaaaagtataaaaattagctgggcatggtggtgggcgcctgtagtcccagctactcgggaggctgaggcaggagactcgcttgaacccaggaggcggaggttgcagtgagctgagatcacgccattgcactccagcctgggcgacagagcgagacgccgtctcagaaaaagaaaaaaataaatcaaataaaaaaataagaataaaaatacaaaaattagctaggcgtggtggcaggcacctgtaatcccaactactcaggaggctgacgcagaagaatcacttgaacccgggaggcagaggttgcagtgagccaagattgcgccactgtactccagcctgggcaatagagtgaggttccatcccccccaaaaaaaaaacaaaaaaaaaggaaaaggaaaaataaatctatggaactgctcatggggaggagggacggcctggccctgccactcatgttgacgaagaagtaaactgaggcacggcccttccctcccccatcagaactgaaaggtgtctgaggccccagcaggccctctgcatgagattcggtggctctgagggcctcagatgtcctcactcccccccccgtttctcctgccaggctcagagtatcattttcaaaatggtaaccagcaaaccaacgtgattctcgcacaaaggcaaggtgagcctgttcctcgctcaccctgaatcattcatgaaggaggcagctggcctgcgggctgggatgggagacaggagaggagaaaagacagaggctgggccctgctcgctaaataaatcaggtgcccacgggagcccctgggcgtcttcccgcgctggcgttctgcatatgacagctgacctgtaaattgctgggccctcagccatggttactgtcaggccagcccaggaaggacactggtttcaggtgacctgggtgaggtggaggcggtggggggggttcctgggaccaggccgccattgcaaaaacaaacggcctgcttgtacctgctatcgccctctaagcttcaggtggtgggtggggctgaggggctgagaggtggccccaaagaaagacaaccacatcctaaaccctggaacccgtgaacaaggcttcatttggaacaccagtctttgaaggtaccattaagtgtcttgagatgagatcatcctggagtctgcaggtagaccctaaattccgcgacatacattttattttttatttttacttttttttttgagatagcgtgtcactctgttgcccaggctggagtacagtggcgtaatctaggctcactgcaacctccgcctcccgcgttcaagtgattctcccgcctcagtctcccgagtagctgggattacaggagcaaaccaccacgcccggcaaatttttgtatttttagtggaaacgggctttcaccatgttggccaggatagtctcaggctcttcaccttgtgatccgcctgcctcggccttccaaagtgctgggatgacaggtgtttattttcgtttttgttttttagagacagagtttcactcctgttgcccaggctggagtgcaatggcgcaatctcggctcactgcaacctccgcctcccgggttcaagtgattctcttgcctcagcctcccaaggagctgggattatagggcatgcaccaccacgcctggctaatttttgtatttttggtggagaggaggtttctccatgttggccaggctggtctcgaactctgacctcaggtgatccactcacctcggcctgccagagtgctgggattacaggtgtgagccattgcacccggccagacactgtcttaaaaaaataaaaataaaaaaaggtactggacaggtggctggtcatgtggggcttgcggggtaagggatggccttgggtttatactttgagcaagacaggaggcctggcggggccacgatcagaagtgggttttaacacgattccgaagggttagactggtgcttggaacctggtggtctctactgctgccagctgccactcagacccccggccgcccctgcctgtctgctttcagggcggggcccatcccaggcactccgcgaacagacagaagcggctggttctggtggtgtgaggatgggggtctccaggggagcaaatccacagtaacacactgggcttctcccagatccaccggacattcctgatgagtgaccctggctgcagatggctcttggtgagtctccgttgaccgggtggttcgggccaaaggaccttgccgtgcgatgcctccatggagctcggcggccacccctaatccgggctggaatcctctggcaccagacgcccggcggggctccaaggctcctgggcccacgccaggccccggcctgaaacgcagcactgctggaataaaacacgccagagaagcagggcgctaggctcgcctggatttggggaaacgagaattgtcatgtcttctccctccgtaggttggtgttaatgaaaaacccccttttcagcatggactaaatcccgctaattctatttagggagcagtgtctactccgggccgggaactgctccggtttccaaccgcagcctcccgtgagggtcccagtgtggagggccggggtcatcccctcactctgggatggctcccaacccgctgacctggcctccccgtcaggcaccctcacagctctgtcagactcttcatgtgatcagcgctcctgggaacattagtttagggtgttttctgctgctgggatggtggcccgggagggaccctcctggtgaccctgctgggcctggccctcagtttccccagccgtaggctggcagcctcgaactgtacgagctccaggccacagtttccccagctgtaggtcagtgggccagggactgtagggggctcgggcctcagtttccccagctgtaggcgggtggcttgggcctcagtttccccacctgtaggcgggcggccttggattgtatggagcccgggcctcagtttctccagctgtaggcggatggccgtggactgtgtgtggcctgggcctcagtttcccccgctgtaggcagatggccgtggactgtgtgtggctttggcctcagtttccccagctgtaggcggatggccgtggactgtgtgtggcccggacctcagcttccccagctttaggcggttggccgcggactgtgcaaagtccaggcctcagtttccccagctgtaagcgggcggccgcccactgtacaaggtccaggcctcagtttccccagctgtaggtgagaggccgcggactgtacaaggtccaggcctcagtttccccagctgtaggcgggcggccaaggactgcaaggtccaggcctcagtttccccacctgtaggcgggcggccgcggactgtacaaggtccaggcctcagtttccccagctgtaggtgagaggccgcggactgtacaaggtccaggcctcagtttccccagctgtaggcgggcggccgcctactgtataaggtccaggcctcagtttccccagctgtaggcgggcggccgcggactgtacaaggtccaggcctcagttttcccagctgtaggcagccggccgcggactgtgcggggcccggacctcagtttccctatctccgcagtcgggattcgctgttccggggcgaacaaagaacggtcgggggtgaccccggatcatggcgcgcccgcagtatctgtggccactgtggaaacagccctggcgtgtccgggacgcgacgcggcctttccctccccgcgcgatcacccagatgtgagcgctcagtttgaatcggactttttggccatgtgcccacaaccaacatggagccctgagggtttcctgcccgactccaagatggcgatgcgactccctttgccctcacggcccaggcgggcgggtcctgcccacttgcaagatggcggcagcctgggcaaagcacgcttcccgccgcctgactcgccacgtacccactctcaagatggcgtctcccgcaaagccacgcgccagctgactggctcagacgccgtcacgtgatcccattttctccccctcccccgactacacaagccgtttccgccttcggccttgaggaataaccgcctcccccaataggcgcctgcgatttctctgggtcccgcccccgggcggccttctggccagtgggaggtgctggcgggggcccgcggggctctccccgccccctggctgcagcgggagccaatgggcagcgcgcgcgggggacgtgtgcgggcgtctccgccattttgtgagtctataactcggagccgttgggtcggttcctgctattccggcgcctccactccgtcccccgcgggtctgctctgtgtgccatggacgggtgagtcgcacgtcgccccgcgccccaccgccctccccgcgccgcagccctgcccccgccgccgcgccggcctccccggggccgatctcgccccctctcgggcgggagggggcggcgggctctccccttcctctccgcgtggcgggcgcgggtgcggggcgggtcaggggcttcccgggggtctggccgcgtccccatcccccgtccggcccgcttccggcccccgcgcgccccgtccctagcgcacgcggcctcccgcgcccctccccctccgcgcgcgtccccgcacttcgcctttgccccgcctcggcggcgcgcggcccttcccgcttcccgtccggccctcgcgcgcccggatggcccttcccgcctcccgtccgctcccctcgtgcgcctgcgtagcccgtcgcgcgtccccgttggccccagcgcgcgtgcgcggccgccatcgggggcgcgcgcctttcccgccgcccggactctgcccccggcgcagccccggaagcgcaggcggggctggggcggccgccgggagggaaagctggcgccggggcctcgccgcgggcccgagtctctgcgctccccgccctacccctgccccccgtgcgccccgggccgcggccaaggggtttcggtgatctcgggagagaagcggccgccccgagggtctgtcctccgccccggggccggaggggcctctccagggacccccgcgggcgccgtcatggggaggggccttcccggctctcgggccggggcagcctttccgggcggctttgctgggcgggcttcccttgggagaggtgggagccccctccagaaaggccgtgtcccgccgagcgcttcctgcgcgaggccctccctgggaataggaagcgggagaggctggagatgtttcgcattctttccgttttcctgagaagtttttcttgggttcagtcacttttaaaagtctgttaaacgtggtccgtgcagtctgtggtgtcagaagaggcgcagccctagagtgggtctggaccccttagcatgcgtgcgggcaggtgggtcctgcagacggcgagacgagggctccccgctctcggacccagcaccgcgggctcgggggccgcgcactcgcctcccggagtgaggcaggaggcccggaggctgcccttccgacggacgctccgagtcacttagggcctcgccgggagttgcagtggccgggagaagccgtggggagctcactgttgggtcaggacctggccggggctgaagggagggcctcggacagtccggctttctatccaccttccccccggggtgtcccgaggagggagagtcgggtcgggcggggctcgggttgatcagtaactgaggctgtgttctggtcggtctgttaatttttattgacggtttccacggccgcctcctgctctcctcggtggatcgggctccactctgctgagaggcaccctcttgggggcccacccctacccgggtggaagctctggcccaggcctgtgagtttgccagtttcagcctctccgaggcgtttccaacttactggaaagcacacagcagcccttgaaccctctcagcggcatctagcattcctcggggcttccgatgggggtgtctttgtcttggaacgtgtggggcctggtccagaggtggggcctggggtcctgctgggagggaggggcgccaaaggacaatggtggccccttttcaagttgcagtcaagtggacggctcacttccctgcccttctgagctttctctagcggggcctcgtgcagccagagggagccctgcggaggtggcagctgcagggacctacgggctctcctggcccggggacagctgggtgctcctgctgctgagtggccaccaggctaacgttgtctcctttctttctctctacagcattgtcccagatatagccgttggtacaaaggtaggcacttctcactttgcttctccgtgacgctcctctgaccttgtgccgaccccgggggccaccccccagcgctgttgcgttggctagagggcgcttttccattcctaaggggcactacccttggtctggaatctggagttgggcggtagggtttgaaccccgggctccagtgcccgtgagttttgggggcttgggtttgctggccgcccctcaggtctggaatctgagctgctcttcggttcttgctgtcagcagcgagggctctgtgtgccccaggcctgcctttggaacttctgcctctagaggctggaatcgtgccgttcagtgggaaacctcatgttgtggctgcctgggagactcttggttttgataggaaaagagccacctggctgtggaggggacctggatagaatccagcctatttgagtggctaggatgggcatttactggttgattttgacgttaagtttttttgtttttgtttttgttttttatttttgagatggagtcttgctttgtcaccaggctggagtgcagtggtgtgatcttggctcactgcaacctccacctctcaggttcaagcgattctcctgcctcaacctcctgagtagccgggattacaggtgcccaccaccatgcccagctaatttttgtattttttttttttttttttggtaaagatggggtttcgaacattgttggccaggctggtctggaacacaggtgatgcaccccccttggcctcccacagtgctgggattacagttgtgagccgccagacccggctgacattaagtatctttgatggcatctggttagaacagcagcaaactgtcaaaggtggtgtttggggcaagagaaaaatgaatgtgccacgtctctggggtgtgcgaatcttgcagccccatggagggtgaggccagggctcagcatgtgaggaaagggggtcagaacctggagaagaagaaggtcctggggaggcgattctcgagggagctgtagtcctcgcttagctggggtagttggttaatgattctgctggtcattgtgggttgagggggctcccgacttcagggcttgtgccccgagagcctcccgcagggcgagcccacagtggtggcgtcctgagccagcagccagttggtttctggtcagtcagcagtggtgcctgggccaggtttcggtttttcccaagtggactgctgtctttacgcgctgcctgccccgatcttcctggagataaaacctgtttgttcagtgtgggaggagggagaggtactttcatctgaagcatttgcaacaatccctagatgtgtctggcttgcaggcagtcgtctcttccctgcttctgtgggcctgctttccagctggagtggccctcagcttccatcgggtggtccttgagccctcctctgcagttcctagggggctcctgggctgggacgttgaagcccagccaggacttgaagcctgcgggagggattttgccacagggcagggttagggctcctgctgggtgcaggccctggtaggaggacggggtagtaccctgacccagatgataccccccctcccccccaccaccagggagccctcagctgacctgggcccacacctggctacgctgtcctttagcccaggacagagcaagctcttgttcagtgtggggttaaagacacctaggaactgtgctgtagggccccagctgcagactggaagtcctggggcgtttcctgtcaatctgtgtgcttcaggacaggtgccctgaagggaccctcctggggtacctggcagctgctgtgaaggcagtggaggcgctaggcccagctcgtgtctcctggttgctgccctgtggagcctcggagcctccaggtgtcccttccgttctgctggggcgccgttgagctgagccaagccggcctgtgccgcctgggcaggcatggagtttgctgccgcagacagttgtgggcaatgccaggccacttgcccatgggaatgagattagggcttcaggcaggcggccaagaggaccgctcagaggaagcggccccgcccaccactccagtcaaagacagggtccaagatgccctttttaaggtttgtgcagccagcacatgggagccgcatgggcgcttggccactctccagcttgggggaggaccagccctggtgtcctggacggggtcggctcctgggctcccccagcctctgagctggaggggagagcagacaggaagcgacttcctgtgggaggcgaaggttggaggccctgcgtctcaggtgcacccatcctcccttcctcccgtcctcccttcctccggtcctggcactgctgtgttttctgatcgcgtggtttccacctgaggcggctggctctgacccctttcccctgggcctgcgcagccccgccttgtgctcatagggggccccagactctgaaagcgagaggactcgagggtctgttttcagtatttggcttcatctgtgtccggccggaacctcagggccgccgtgacactggacactgttcattctctgaccctaaagtcttggggactgaacaggtgccatttgggtgggcgccgggcctgtggaccctgagtgattcctggttccggcccttgtggctgctcgattgcttgtttggtgacgccctgagtgcttgtgggattggtgggagactcagggctgcagttagaggtctcattggcaagggccagtccctgttccccatcctccttgagcaggtgccggagtctcccgaggctcttgccgtccgcgtcgggaggaggcagctgtggggctttggaggctcgggcagtcttccttccaggaagctcttgagccagggccagggcaggagtggagctgaacgtgggtggaggggaggcggccttaagagaagaccaagcgcaggctcggggaggccagcgttggtgggggctctttggccaggtgtgggggcagctccttgaccaggcatgggggtgtgtggagctgggggttgtctgaggggggacagggtgtgatatccactggttctttctgatgcgatggccctgggcccttcagcaggtgggggcaggctcttggcctcaatcctgatacgggagatggaggctcctttgttccctgggatggccctgtcctggggggcctgggcgttgctgccctcagcgcctgcagaggctcgctttgcagaccaagcgcctgtgctccaaggtcctcagacccgagctttgttttctgtgtaactaagggccgtaaccaacgtctcctccaatttcactctttgaataaacgtgtgtcttcaatccttgcagcgggggggatgtctgccgtcctgagcctaggatcagtctagtgcaattcttagaagttgatccaattacatagaaataaccagtgaatagattgtttctggagagaaaatggacaggtcagaagtgatggagccgctgtggagctcccccggccctagtcacggccgcgataccagcggatcactgggcgggaggccgtgtctctagtcctcagtctcgcgtgtgcagagacggaggtcgggtttcttttccgggctggaaaacaggagaggaggggctcctgcgagagtgagggaggcagcgctataatttggttctcttgcgaggccaccagaagtgaggacggctgcctgggccctgccgtgtgctgctgggggggctggctccatggagggggtcctctgccctgctggctggtggctgaggccccaggcctgtgcccagggccgctggcagcacagtgaggccacgtccacagcagagttggccgtggagatagtgtacgtggtgccctccgtagctgagagcctcccagccccacactggctgagtacccagggcttccagaatttggaaaaaggagcagtgttttggtcgtggagctgtggggtgccgtgcgcgtccatgggctgggtctgcgctcaggctgccctgccgtggaagtgtgggtgtgggtatgggttgggggtctgggaccccaggcagcccaagtgggagcagggccggccggtggggaagggaggctctggcctggtgggaagtgcagctccgcgttgtcccttctcttgcagcggggatctgacgagcttttctctacttgtgtcactaacggaccgtttatcatgagcagcaactcggcttctgcaggtaaggccgggactcggcccagggcaagacccgtgggtgtctttccctggaacaacgttacgttcttgttctgggactctactttccatctccaactgcaggggcccatggtccacgctacagacccaggtccaagttctcgctgcagagaatttccagggaggcgctggatggatggtccaggctggcacttggacctgtgggcgggttgtcaggagctgtcgggagcaggggtcctgactgtgcaggtcttggcctctcgcgctgctggttcacatgcaccctcctggggctcagggttggtctccgtagcaggcagggctctagggggatagcagggaccttcctctgtgggctcctgcgagttggtgcctgcatctcatggcacccccttttcagcaaacggaaatgacagcaagaagttcaaaggtgacagccgaagtgcaggcgtcccctctagagtgatccacatccggaagctccccatcgacgtcacggagggggaagtcatctccctggggctgccctttgggaaggtcaccaacctcctgatgctgaaggggaaaaaccaggtacctgagccgcgtttctccggggtgctcacaccgtgcaggcggggacgaggagggcccagcgctcactgcctccccaacaggccttcatcgagatgaacacggaggaggctgccaacaccatggtgaactactacacctcggtgacccctgtgctgcgcggccagcccatctacatccagttctccaaccacaaggagctgaagaccgacagctctcccaaccaggcggtgcgtggccccgcggcggaccccagcagcccggggacctcgggggtgggcccagccgcaggggccggggactcacggctgtgcctcccacagcgggcccaggcggccctgcaggcggtgaactcggtccagtcggggaacctggccttggctgcctcggcggcggccgtggacgcagggatggcgatggccgggcagagccccgtgctcaggatcatcgtggagaacctcttctaccctgtgaccctggatgtgctgcaccaggtgaggtggtcccatcaccgccagggcaggtcggctgctattgctgtgggcacaggcacacgggaggggcctggcagggctggtgggcaccgggcaggagctcatgctgtggcccgggacctgcagattttctccaagttcggcacagtgttgaagatcatcaccttcaccaagaacaaccagttccaggccctgctgcagtatgcggaccccgtgagcgcccagcacgccaagctggtgagtggggctcccgggacggcgcccgccctggccctggcccggcgacgtctcacggtccctctcccctcagtcgctggacgggcagaacatctacaacgcctgctgcacgctgcgcatcgacttttccaagctcaccagcctcaacgtcaagtacaacaatgacaagagccgtgactacacacgcccagacctgccttccggggacagccagccctcgctggaccagaccatggccgcggccttcggtaagaggctgcccgacgcggcgccagtgtgcagagtggtctattagggccgctcagtccggagccccggcggcacgggcccggccctgcaccagggtgatgcacctgctgctctctgcacggccagcacagcacggtccagtgtcccccacgtcgggaccacggccccccctggagcagcggatctgcccgcgaaggctctgccggggccgcccgccggccgggttggggcccatcccgcagcacagcgcccgctcgcggtggaggttgtgggtgcgatgattagtgtctcatttatttctaggtgcacctggtataatctcagcctctccgtatgcaggagctggtttccctcccacctttgccattcctcaagctgcaggtattcaaacgcttggtcttggttccccagcgactgcatgcccacaccaccttcccaggcagctccgcatccacggcggcagcctgggcggactgggcactcgagtgccaggtcaggggcccttcccgggagaggggacgccacgtccacagagcaggcttggccagggcagtggtaggacagggctgtggaggcccacgtgtggacggcgccagccagaagccgctaatcgcacagtctttgtggtctggttcccttcaagcacctccgggcgagcgcgaggaccgccagtggttggagggatgtctctagtagttgaatttgagtggcctggtaagcgcgcggcccgaggctgagcagcatgaccggcggcgggacgtgtgtgcgtggccgtcctcccgcttcccttctgggaccggggcccggccgccccagtgctggccgtggacggagcagcgcgtgccgcccggcggccgcctcgtctgcatggaggcatgggcgcgcatgcgcggtggtcccgggacgggccctgcttgccgagggccccgtgtctgtgctggcggagccggagcttttctgtgctgtgggcggggcgcatgcagatgagcccaggcccggcccggcccgtgctgtgaggagaggcgggcgctggtgcaggagccggcgggtggctgtgcgggggtcggacgaccccacaggcacccagggtagggccagagccagggccgcctcccgcgcggctcggctcctcggtgcatgaggacggggagcgtcggcctctcccactctgcggtggagtcgggggcgccgccgctcatctcacctcctgcttttccaggcctttccgttccgaacgtccacggcgccctggcccccctggccatcccctcggcggcggcggcagctgcggcggcaggtcggatcgccatcccgggcctggcgggggcaggaaattctgtattgctggtcagcaacctcaacccagaggtacgtgggcttttcctccgcgccgccgttcctcccggaagagcgagcaggggatgttgtgctcgggctcgggtcccggagcagcgccgcccctcgctgtgtctgcgcctctgccctggcagcccctctgctgcagcgctgagaccctccttttccaagatggcttgagttttcctcttttcctgaattcacatcttggttcgcgttttctcttgcatgatacgcagaatgaattattttttggttacccaaaggcaatctaaaaattacttggagctgagcagggcgcgcagttcagagccccagcaggccgccctgctggtcagcgggacacacagggttagcgcggcggggtgtgggcagcccctgtggctcgagagcctgtcacttaactggtggatccgttatttcccagaatggttaaattcccctcggggagagcttgggtgaaacaagaggcccaaaatatgtaactcttgatggatgggatcctcctggaatcagcatttcaggctgttctgtttcccggcaactcctgtgacttcctcaaggcggtgcccagcctggccctccctcgcgggggcccaggacgcactccctgcctgtgcctcttaccacgagccgggtgctgtccctccagctcctcctgagcgaggccgtgcactaacagactcgatctcccttcacgcctgtaatcgtccttagagactgacttgtgccacagctgcgggagacagcgctgctgcagggcttggctgaggtggccgcgagcggagctgcacgcgcgctcctggggggcgtggttgggatcggcttctgggagcccctccagcagcgctgtctctgccggcatgtgagtgaaggtgcttctcttaccgtgtgcccgtcgaggtaaacctgtaactggaatgtgtgtggagtgtgactgatagaacactacctgattcttatgtatttactgacctgtgtttttttgctactttttttcttttctccccttcccctttccctattttttttcttgccctgatccggaatttctttgccaactgactgcacggtacttctgcttcctgttgttgcttgaaacaaaacaaaaacataaacaaataaaaaacaaaaattccccctcaaaccctgctctccggaaaccaacctgcccttgaatattaacatcctgacaacttcatcatccatcaaccactgcacgcctgcggggactgtcttcctcgtgtggacgattggcaactcgccccccttgacctctccctctcccctgtccctccgctgccttgctctgctgtctctaaagagagtcacaccccaaagcctctttattcttttcggtatgttatcgttcacacttttattaccttgttttcattaattgagatgattttgatgccctgagacgtattatgagtttgcggtttggcactctgatgctccgtggcatccgcctcgttttatggtttgctttcggtttgcgaattttatttggtcccgtagatacgtacgcatggtttatcgccctgcatgcttttcagagttagacctgtcggtggcatatgccaccgtggccacccgctggcagcttacctgtcctggatgctatgactttgctgaacggagctgctcctgttagcgcgccctgtggctgcgagacgcagctccgcagtggccgataaagcaaacccggccgggctgagccgggccttgtgggggtgcgcggggccggggctgacggggagatgggcggggcaggcagcaggagactcaggccccatccctgggcttttgaaggcgtctacggtgacgtgcagcgcgtgaagatcctgttcaataagaaggagaacgccctagtgcagatggcggacggcaaccaggcccagctgggtaagaggccggggcggccccggggtggagggggcaggggcgggggctgcgttccctctcgggcgcctggtcacgcgggtgctgctcccccagccatgagccacctgaacgggcacaagctgcacgggaagcccatccgcatcacgctctcgaagcaccagaacgtgcagctgccccgcgagggccaggaggaccagggcctgaccaaggactacggcaactcacccctgcaccgcttcaagaagccgggctccaagaacttccagaacatattcccgccctcggccacgctgcacctctccaacatcccgtgagtgctgggccggggggctcatggggccgggggcgggcaagggctctgcttggctgtcctaccgcgtcggtgtgtggacttctggcgtttccagagtgcaggtcgggcacctcttaccccaaacctgaagtactgcaaggcctggagcttgagccgagggctgctcaagggagggggtcgttggacactttggaggttttggctcaggggatgctccctgtgagaatgtataatgcacacatttatttatttatattttttgaggcgaagtcttgctttgtcacccaggctggagtacagtggaacgatctcggttcactgcaacctccgcctcttgggttcaagtgattgtgccacctc[134 bp omitted]gcctcccaaagtgctgggatacaggcgtgagccaccgcgcctag[132 bp omitted]cctcccgagtagctgggagggactataggtgcccgccagcacgcccggctaattttttgtatttttagtggaaacggggtttcactgtgttagccaggatggtgtcgatctcctgactttgtgatcaacccgcctcggcctcccaaagtgctgggataacaggtgggagccaccacgcctggcctaatgcacacctttataatcccagtactgtggggggccgggcaggggattgcttgaacccaagagttaagaccagcctgagcaataaagtgagacctctgtctctacaggaacaattggttaaaattagctaggagtggtggtgtgcacgtcaggtcccagctcttccggattgggaggttgaggtgggaggttcacttcgcgctcaggaggttgaggttgcagtgagctgtgattgcactgccagactccaggctgggcggcagagtaagaccctgtctgtaaaaattacataatgcaagtatttggaaatgcaggtacatctggccccaagcatgtcaaccagtagtaagccctttgatatttaacacgttacttgtgaaatgttatcagaaaatcaacaaggggcctggcagagtggctcacgcctatcatcccagcactttaggaggccgaggcaggcagatcacctgaggtcaggagttcaagaccaacctggccaacctggtgaaaccccgtctctactaaaaataaaaaaattagcctggcatggtgttgcgtgcctgtaatcccagctacttgggagactgaggcaggagaatcacttgaacctgcaggcggaggttgtggtgagctgagatcacgccactgtgctcccgcctgggcgacagagcaagattccatctggaaaaaaaaaagtggaggagcgtggtactctgtttctgcaaacttgtagatgcctggtttcgttagaagctgcttcagaccattgtggacatgatttgataccccatttctgggctcctaaaaggccctacgccttccccggctactctgaaaactagtctggggaaagcctcgcggacctgactgggcgcccccacccccacgcggccccaggctcacgcctttctcctcccacaggccctcagtctccgaggaggatctcaaggtcctgttttccagcaatgggggcgtcgtcaaaggattcaagttcttccagtgagtatgaggcgggctgtccctggctctccccaggctgccctgcggccggccctgaccccctgtcttgcaggaaggaccgcaagatggcactgatccagatgggctccgtggaggaggcggtccaggccctcattgacctgcacaaccacgacctcggggagaaccaccacctgcgggtctccttctccaagtccaccatctaggggcacaggcccccacggccgggccccctggcgacaacttccatcattccagagaaaagccactttaaaaacagctgaagtgaccttagcagaccagagattttatttttttaaagagaaatcagtttacctgtttttaaaaaaattaaatctagttcaccttgctcaccctgcggtgacagggacagctcaggctcttggtgactgtggcagcgggagttcccggccctccacacccggggccagaccctcggggccatgccttggtggggcctgtgtcgggcgtggggcctgcaggtgggcgccccgaccacgacttggcttccttgtgccttaaaaaacctgccttcctgcagccacacacccacccggggtgtcctggggacccaaggggtgggggggtcacaccagagagaggcagggggcctggccggctcctgcaggatcatgcagctggggcgcggcggccgcggctgcgacaccccaaccccagccctctaatcaagtcacgtgattctcccttcaccccgcccccagggccttcccttctgcccccaggcgggctccccgctgctccagctgcggagctggtcgacataatctctgtattatatactttgcagttgcagacgtctgtgcctagcaatatttccagttgaccaaatattctaatcttttttcatttatatgcaaaagaaatagttttaagtaactttttatagcaagatgatacaatggtatgagtgtaatctaaacttccttgtggtattaccttgtatgctgttacttttattttattccttgtaattaagtcacaggcaggacccagtttccagagagcaggcggggccgcccagtgggtcaggcacagggagccccggtcctatcttagagcccctgagcttcagggaaggggcgggcgtgtcgccgcctctggcatcgcctccggttgccttacaccacgccttcacctgcagtcgcctagaaaacttgctctcaaacttcagggttttttcttccttcaaattttggaccaaagtctcatttctgtgttttgcctgcctctgatgctgggacccggaaggcgggcgctcctcctgtcttctctgtgctctttctaccgcccccgcgtcctgtcccgggggctctcctaggatcccctttccgtaaaagcgtgtaacaagggtgtaaatatttataattttttatacctgttgtgagacccgaggggcggcggcgcggttttttatggtgacacaaatgtatattttgctaacagcaattccaggctcagtattgtgaccgcggagccacaggggaccccacgcacattccgttgccttacccgatggcttgtgacgcggagagaaccgattaaaaccgtttgagaaactcctcccttgtctagccctgtgttcgctgtggacgctgtagaggcaggttggccagtctgtacctggacttcgaataaatcttctgtatcctcgctccgttccgccttcgttgctggcttcctctttctgtgccgcgggcggccccgactcccgcccgggtgtccgccgaagcgccaggtggggccacgggcggggtgggcccggccctgagagtgggggtccctgcgtggggcgtgcgggccagagcgaatgaccaagagccggacctcggtttctgccgctttattgagcatccgcgcggccgcccgcgccctcggcccgccccccgcccgcccccggccccgccgcgctagtcggggaagcggcgcgcctgcatcttgcggaagtagccctcggcctccgcctccgcctcgcgctccgccagccccaggccgcccgcgtggcgccgcagcgtggactcccggctgcccgggcccagcgccccatcggccgcgcccagcgggggcagcccctcgcccgtggccaggttgacggtggccacggccccgaaccgcggctcctcctggtccacgtcgctgaccgacgagccgggggacacgcccgggggcttggccccgccgcggaagccgcgcgccaggtcccccagctcgtagccgccgtcggcctccgccttggccccgccgcccgccgccttccactcccagggcgcgccgccggccgacaggtgcaccacggggtggtgcggcgcgtgcgcgtcgatggtcacgatgctggcggagtcgcggtccgacggcgaccggtactgcgaggagtcggagctggcgctggacgacgacgccgtctcggccgccttggggcccggcgcgcccggagccttggacatggcgatgacctgcagcagccgcggagggttggccactgccgccccgctcttctcggccatcatgagccacttggcgcgcaccccggcgccgcttttgggggacaggccggcccccgtctgcgcgccctcctccgggatgtgcaccagcggcggcggccccgcgcgcggtgggaggatgacccgaggccccagccccggccgcgcctgcacggtggggtagagcgagggcggggccgggccctcgtcctcctcctcttcctcctcctcctcttcctcttcgtcctcctcctcttcctcctcctccgccatgggttcggcgggcgcgcgcaggtgcccggggctggcgtcgtcgggcagccccaggccgcggccctccaggctcttctgcttccactcgctgatgagctgcttggagcgcgaggcgtccagcggcacgtggatggtcatgtggcggcgcgcggggtcgtccagcgagggcgcgctggccctgggcagcgtgtggctgaaggtcaccatgttctccttggccatggggctgcgcggggccagcaggtccacgtccacgctggcgcgcttcaggctgcccagcgaggtcttctcgcgggccacgggccggggcgcgccctccagccgccctgggggccccagctcgtcggtgctcaccgacttattctgctgataaaccgagtcgtggccccgctgcgtcagggcccgcagcgcgtccttggcgggggccggggccgcgggcttctctgcaggtggggcctggaagttgcccaccgcgtggcaggcctgtcggggagaggggtctgggggtgaggcctggggctcagagggctcctcccctgtgatcgttggacttgccgcggggggctctggaccgggggtgggggctggcaagctcttgtccagtgggaccggttcccaccccaaggttgctgacccagcacatcgggcaggtctgagcccacgggattctgactccagcattccaagggcgagacacttcagcacccatgccttccccctaagaccccttcgggacccacgtctatcccctcagacaccctgggcacccgtgcctcccccctagagcccctgggcacccatgcctcccccctcagaccctctgggccagccccccgccagaacccctgggaaccatgcctcacccctcaggctaccagcctcccctgtcagaccccctgagcctgcctcccacctcagacccctgggccagcctccccactcaggccctgtgggcactcatgcctcccccctcagatcccctgggaacccatgccgacccccatcagaacctgccactcaccaggtaggcagcgatgcccgccccgatgaggaagccggcatacacgtccacagggtggctgcggtactgcgtgatctgcgtgagcccgcatacgcccgcggcgatggcaaaggcgaagaccaggatgggcttcagcagcttggtggtgtccgagatgaccgagttgaagtacatctggggcatgggggttggggtcagggagggctccccacgggtcagcaagagggcctgggaagggcagtgaggggccggactcaccgacacatagaccgcggcgaaggctgacagcgtggcgtgctgggacgggaaggtcttcctgtaagaggcgtccagcgtgagccccgcccacctggggaccccagctccagtggcctctctgtgtctctgtttccccgcatgttcaccggggcggaagaaggctcccagtcaggggagttgggggtccggctcaccgtgcagacaggatggcgtggatgtcgtggccggagcagatgtcctgcgtgatgtaggggttgacctcgcaggacgtgcccaggagagtgtagttgggcttgcagacggtgaggaagaagggagtgtggtaacccgtggccagctggatcacgtccgtcaccagggctgtggcacacaggccgaacacgtggacacctgcagggcggaaggctcggccaggcggggagctggggacccgggacagccccaccccctgcatgtggaggtagctcagggtcggggcgcgtcccgcaactcacccacaaaccgcaccgtacgccgcaggaaggagttgaagttgcagccgccggcgttgatgctgccctccgccccggcgggccccccggcacggccccacagccgggactgcagacagtacaacatgccctcggccaccatgatctgccaacagggagggggcgctcaggcctcggtgcccacagggagggggcgctcaggcgggctcccatctgcagtgcccacaggctggcacaggccccggtgtggatgttcaccgaggtggcgggggtgggctcccagccgtggtgcccacaggctggcacaggccccggtgtggatgttcaccgaggtggcagtggctgcggtgcccacaggctggcacaggccccggtgtggatgttcaccgacaggccccagtgtggatgttcaccgaggtggcgggggtgggctcccagccgtggtgcccacaggctggcacaggccccggtgcaggtgctcaccgaggcggcaggggccgcgaaggccaagctgagcagcatcagcagcgggatgagctcctcgttggtctccacgtagggcatggagagagtgcggtcatagcactggaagcccaccttggccggcttgaagaggtcggtcagctccaggaagtacaaggatacgatggaagaagccactatgggcagctgtggggacaaggtgggccaggttcaccctgctctccctcgcggaggcgtctgtccagccctccatgaattcagggccatccaccgtctcactcacctatccacagatccaacccgctcccagccactctttcccccatgagttattcatccatccacagatgctccatctgtaactcgaccatctacacatcacacacccactcactcatcctccatccacccaaacacctatgcccccaacatccacccactcaccgacccatcacccacccatccatccactgggaaccatccatccattcatccatccacccacccacccatcatctatccacccattctccacccatgcacccaacggtacccatccatccatccatccatcacctagccattcattcatctgtccatccatccatccatcatccacccatgcagccatccatctatccacccacccaactgtccatccatccacccacccacccatccatccgtccattcattacccagccattcatccatccatccacccacccatcatccatccacccattctccacccatgcacccacccacccatctacccacctacccatccatccaaccgtccatccatccattcattacccagccattcattcacccatccatccatccacccatcctccacccatgcccccagtggtacccatccatccatccatccattcatcacccagccattcattcatctatccatccatccatcatccacccattcatcatccagccattcattcatctatccatccatccatcatccactcatgcacccaatggtaccatccatctatccacccacccaaccgtccatccatccgtccattcattacccagccattcattcatccatccatccacccacccatcatccatccacccattctccacccatgcacccaacagtacccatccatccatccatccatcacctagccattcattcatctatccattcatccatccatcatccacccatgcagccatccatctatccacccacccaactgtccatccatccacccatccacccacccacccatccacctatccatccacccatccatccattgatcacccatccatccatccatctatccaccctcccacccacccatctaccaacctacccatctatccacctactcatccatctacccatctgtccatccacaacagtcttgctctgttgcccaggctgcagtgcagtggtgccatctcaactcactgcaacctctgcctcctgggtttttgtatttttagtagagacagggtatcgtcatgttgcccaggctggtctcgaactcctaggctcaagtgatacacccgccttggcctcccaaagtgctgggattagaggcgtgaggcaccgcacccagccatggcctcaagcctttttttttcccccactctgtcacgcagcctggagtgcagtggtgcaatctcggctcactgcaaactccgcctccaggttcaagagatcctcccacctcagccctccaagtagctggaattacaagcgtgcactaccacacctggctaattttttgtatttttagtagaggcggggtttcaccatgttccccaggctgccctcgaacttctgacctcaagtaatccacctgcctcggcctcctgaagtgctgggattacaggcatgagtgaccttgctcaggcatggccccagtcgtaatttctgccttgttatggcatcttagcaggggttcagccctcagtccagtcctggggagggcacaggtcagggctgggggctccaggaagggaaaagccatcactgaacatcccagggcagaattggatcgagggagctgagttcatgtccagtgagcattcattgagtgcctgttgcatgcaggcacgaggcccggggcagacgcggaaagtgggtagcagcgtttgtttgcacctgacacccggtttgaaaaccacccactttaacctgtgggcggccagcagaccccctgtgcctcagtctcaccagctgcaaaatgggaatgataaagtagccgcctccaagggctcaggtggagatgagtcaatgtgggaggtggcccctggcaactatctacttgttctctccactttcattatcagcatgattttgctggggcgggcagacagcatcaagcccggggagggtctgaggtggggcctgggcgcggccttaaaaatatctaaccatgggccgggtgcggtggctcacgcctgtcatcccagcactttgggaggccgggacgggcagatcacctgaggtcaggagtttgagaccagcctggccaacatggtgaaaccccatctctactaaaaatacaaaaattaacccagcgtggtggtgcgtgcctgtagtctcagctactccggaggctaaggtgggagaatcgtttgaggacgggaggtggaggttgcagtgagctgacattgttccactgcactccagcttgggcaagacagcaggactccatctcaaaaaataataataataaataaaataataataataaggccgaccgcagtggctcacacctgtaattccagtgctttgggaggctgaggcaggaagatcacttgaggcctggagttcaacgctagc[311 bp omitted]caccacgcacagcctactaaaaatgatttttaaaaattagctggggctcaggctagccttgaactccaggcctcaagtgatcttcctgcctcagcctcccaaagcactggaattacaggtgtgagccactgcgctcggccttattattattattttatttattattattattttttgagatggagtcttgctctcttgcccaagctggcgtgcagtggaacagtctcagctcactgcaacctccacctcccgtcctcaagcgattctcccacctcagcctccggagtagctgagactacaggcacacaccaccacgctgggctaatttttgtatttttagtagaggtgtggtttcaccacattggccagactggtctcaaactcctgacctcaggtgatctgcccgtcccggcctcccaaagtgctgggatgacaggcgtgagccactgcacccagcctactttttttttttttttttccgagatggagtctcactctgttgcccaggctggagtgcagtggcgcgatctcggctaactgcaacctccacctcctgggttcaagcgattctcctgcctcagcctcccgagtagatgggattacaggcgcccaccactacgaccaccatgcccagctaatttttgtatttttagtagagatggggtttcaccatattgaccaggctggtctcgaactcctgaccttaggtgatccgcccacctcggcctcccaaagtgctgggattataggtgtgagccaccatgcccgtcctgcaacaggaatttaagtgcaatttcgaaaaataaacagattttctatgaagtgatgtgggcaacttaatgatattgtgtttgggagggacccacttgcccgggtgtgaggtaacggattacaggccagccgctggccgtgtgacctgcacgggtcactgcttccttgagactagggtcccgtcttccatcgaggctctggaaggcccatcactagagccggttttcctggcctgacatgcaaggatggattaaagttattttattttttgagatggggtctggctctgtcatccaggctgaagtgcagtggtgtgatcttggctcactgcaacctccgccacctgggctcaagtcatcctccatctcaggctcctatgtaactgagacctcagctgcacaccaccacgcccagctattttttctgtttttaaaattttgtagagatgggtttttgccatgttgcccaggctagtcttgaactcttgggctcaagcaatccatctacctgggcctcccaatgtgttgagatcacaggcgtgagccaccaccccagccttaagttactctaccatcctgagccaggtgtgtgccaaaatggtagcttttttgttttagagacagagtctctgtcatccaggctggagtgcagtggtgtgatcacaactcactacagcctcaacctcctgggctcaagcaatcctcccacctcggcctcctaagtagctgagaataaaggcacgcagcacacgcccaactaatattttaattttttctgtagagatgggatcttgctgtgttgcccaggttggtctcaaactcctggcctcaagtgatcctcccacctcagtctcccaaagtgctgggattacaaacatgacaaacgtgagccaccgcacagggcagggggctccatttattacatttattgtcttctttttttttttctaagacagggccttgctctgttgcccaggctggagtgcagtggcatgatctctgctcactgcaacctccacctcctgggttcaagcgattctcctgccccagcctcccgagtagctgggctcacaggcataagccaacatacccggctaatttttttgtattttttagtagagatggggtttca[280 bp omitted]acgtttccgtattctgtagatattaattcctatcagctccaggagtggaaaagcggaggcccagagaggttaggggcagggcaccagcctcaccattagcagaggtgaactcagaccctgaggcttcggagcccacgcggcacctgcacccaaccccaccccctccggcctccccgccccctccaggcccccagcccccgacccccagcccctctgaccacaccttggtcagaagggctcccctcctagcacctgcccacagttcccacggcctggacccccctcggttcctctggagctcctactcgacccgcacagcccaagtcctctgccccaccccccatccgccggacaccccggtcctgccccgccccgaggccactgccggggcagctgcgccggctccggtcccccagcgcgggggtctctgcgggcgggcggaaccgaggcgtctcccccgggccccagcgcgacccccacccacctccacgaagtagaagcagggcagaagcgtcatgctgtccttcgggatcttgttcttctccttggtggagatcatggtgccgcgggcgccgcaggccgtggctggaggggagaaagcggcgctggaggggggcgcgcaggcggagcccgggggagacacggtggccggcgccggcgggggaggggcggtcggggaaactgaggctgcagagagcggcgtccgcgtggcctccccgcgccccggcccagcacgcggcttccgggcgcccctacacccgggatcggggggtcggggccgggatcgccgaggagggcggggggtctccgggcgggagccagtccccgcgtggtggtggggggcatccgggagaactggggttccgggcggcggaggagactgggtccgcgcccccagccccacagcccctcacctggcgcggccggcgcccagcacaaagcgcgtctcctccgtggggcggggccgggagccgggaaggggagggggacgggggaggggagggtccggcccggagacccccgcgcgcgcccagacgccgcagcccagacgccgcagccaggggcgggggctctttgtctgggcgcgtcctccgcaggccccgcgcaccgtccccgcctccctggcgccgcctcccaccgccgggggtctcgggggtctcaggtctgcgcgagcggctggcggggctcgggggtcgcgtcctcctcccttcgggcctgcggcggtgacggtcccgtcctcccctcccgggtggctgcggtcggcccggggggcgccatcgagacgggggcggaggcgggggcgggggttggggtttcggggtctctgactgtctccgtgtctctcacggtctctcgccggctccgactgcccccgccccgcgcctccgcccgcccctccgcggagcccgccgctcgctggtgcgcgtttccatggcgaggctcccagggcgcccggagcatcggagacaaaagagctgggggagggggactggggggtctcccggtgcctccctcccttccccccgcactcaccctcgccccctccgccgcgccggggtccaccctccgcctggccgcagccgctcggtgcgcacggcgggattgcggggcgcggggctgggggctgggggctgcgggatgcgggcagggccctcgggacccgcactcgggcagtgcctgctgtctgcgtgcatttcctcctccatatgcgcagccctgcggggtaggggctggttgacccccgttgtagggatggggaaactgaggcttgggcaccctgggtcgcaatccgaggtctccgggccccaaacggcaggatttacaaaaatcggtttttgggccgtgcgcggtggctcaggcctgtaatcccagcactttgggaggt[134 bp omitted]gaggcaggagaatcgcttgaacctgggaagcggaggttgcagtgagccgagatcgtgccactgcactccagcctgggcaacaagagcgagactctgtctcaaaacaaacaaacaaacaaacaaacaaagagtgacttccaggctgggtgcagtggctcaggcctataatcccagcactttgggaggcagaggcgggaggatcccttgaggccaggagttccagaccagcctggccaacatggtgaaaccccatctctactaaaaatataaaaattagccggacatggtggcaggcgcctgtaatcccagccagatgggaggctgaggcaggagaattgcttgaacctgggaggcggaggttgcagtgagccgagatggcaccattgccctccagcctgggcgacagaaggagactctatctcaaaaaaaaaaaaaaaaacaaacaaacagtgactccagagggttggagccctgctagataccttagtttgctcataacaggcactgctgcccccgggaagagggtcgcctgccataaatgcggaaacagttaaatggcgatgggaataggatgggaactcaatggtgttgctacctttggatggactcggaggcagcccagcttcctgggacaggactgcacggactgcctggggaggggtctttggccccccggttcctgcaggggggctcggggaggccctgtgagcagttggtcacaggtgggtcccattcgatgcgatcctgttcctccccaacagccctggagaagggggacgttgcctgctgtggctgcggctgttttcctggcctgtgagaggcggggccagagtggccgttgggaatctgggtgttgcaaggtgaccacaaacagctctctgggggaggaggaggaaaatgcaattgattttcaggagccttctgaggtcaggagtgggagagtgtgcagggggaccctcctggcagcttgggggtccaacagaagatctgggggagtctcagggtcttctccccctaggatcaccagtggtggagatggggcaggcctggccatggagggcacgttgcttggctgaggggcctgggcttgagtgtggggcctgggcttgagtgatgggagagttccgagcaggccggaggggttgagcgtaccagacgctgctcaaaacttttatttaaaaatgattattattattattactattattttgagatggactcttgctctgtcgcccaggctggagtgcaatcgtgcgatttcagctcactgcaacctcccacctcctgggttcaagtgattctccctcctcagcctcccgagtagttgggattataggcgcctgccaccacgacgggctaatttttgtatttttagtagaaagaggatctccccatgttggtcaggctggtgttgatctcctgacctcagctgatctgctgcctcagcctcccaaagtactgggatgacaggggagccacggagcccagcctttttttttttttttgggagacggagttgcactctgtcgtctaggctggagtgcagtggcgcgatctcggctcactgcaagctccacctcccgggttcacgccattctcctgcctcagcctcccgagtagctgggaccgcaggcgcccaggactatgcccgggtaattcttttgtatttttagtagagacggtgtttcacc[140 bp omitted]ccaaggctggtctcaaactcctgggctcaagtgatcctcccacctcggcctcccaaggcactgggattacaggcgtgagccaccacgcccggcctcaaaaacttttcagaatatgaaccccactccatgctcagcactgttctgtctagaaggcagagtctatccctgtctcagggcacactgacgtgcagacagcgagctcgccctgaggtcatgcgactgggagggacagagcttccggctcccggcagaggggaaatggggcctggcccacgggagagctgaggcccacgtttggccaggacagggtggatggaggctggggcctccgcagggaagatggacaggtaggatccggggtgggcagagagggagagctggcttggacggaggcagggatctgggggctgtgccatggaccctgtgaggtggctgggctgtgaaactcagtggagaccggaattattattattattattatttttttgagatggagtctcactgtctcccgggctggagtgcagtggcacgatctcggctcactgcaagctccgcctcctgggttcacgccattctcctgcctcagcctcctgagtagctgggactacaggcgcccaccaccacgcccggctaattttttgtatctttagtagagatggggtttcaccgtgttagccaggaaggtcttgatctcctgacctcatgatccgcccgcctcggcctcccaaagtgctgagattacaggtgtgagccaccgctcccggcctggagaccagatttgagccctgggaccctacattcccgatgggcagcggacctcaaggcacaccggccccgcctccctggactctccccgtatccgccccttggaggggcaaactgccctcagagggctcccacaggcccagacacaaactggtgtccccaagggtgtgggggacacggtaagctccagacctcagtttcaccttggaaatgagcccctttgtaaaaaatggaggtgagtttggacgcagtagctcacacctgtgctcccagcactttgggaggccgaggcaggtggattgcttgagcttaggagtttcaaaccagcccgagcaacatagtgagactccacctctacaaaaaaatacaaaaattagccgggcatggtggcatgtgcctatggtcccagctacctgggaggctgaggcaggaggattgctggaacccgggaatcggaggctgcagcgagctgagatcgtgccactgcactccaccctgggcaacatagtgagatcccatctctacaaaatatacaaaaattagccgggcacggtggcgggtgcctgtggtcccagctactcgggaggctgaggcaggaggatcagttgaacccaggagattgaggctgcagtgagctgagatggtgccgctgccctccagcctgggcaacagcgagacctcaactctgaaaaaaacaaaagaaggagatgaaatttacataacttaaaattagccattttgaacggtacagtgaagtggttttcggtgcattcaccgacttgtgcaaccatcactgctgtccagtcccagaacattccatcaccccaaagaaggaagccccatctccatccatcagccatcaccccctgccctcccccggcccctggcaaccacagatccacttcctgcctctgcagatttgcttgttctggacatttcgtctatttatttttatatagtttttaatttgtttttatttattttttttgagacggagtctctctgtgtcacccaggctggagtgcagtggcgcaatctcggctcactgcaacctccacctcccaggttcaagcgattatcctgtctcagcttcccaagtagctgggactataggcgcccgccaccacgcccagctaatttcttttttttttttgaaatggagttttgctcttgtcgcccaggctggagtgcaatggtgcgatctcggctcgctgcaacctccgcctcccaggttcaagtgattctcctgcctcagcctcctgagtagctgggattacaggcatgtgccaccacgcccagttaattttgtatttttagtagagatggggtttctccatgttggtcaggctggtcttgaacgcccaacctcaggtgatctgcctgcctcggcctcccagagtgctaggattacaggtgtgagccaccgcacccagcttgtcaattatatctcaataaagctgttgaaaaagtttaaaaaaatcacccaatcgggcacagtgtttcacacctgtaatcccagcattttgggaggccgaggtgggtggatcacctgaggtcgggagtttgagaccagcctggccaatatagtgaaaccccatctctactaaaaatacaaaaaattagccaggcgtggtggtggacaactgtaatcctagctactcaggaggctgagacaggagaatcacttgagcctgggaggcggaggttgcagtgagtcgagatcacaccattgcactccagcctgggcaacaagagcgaaactccgtctcaaaataataataataataataataataataatcacccatacagacgcgcaggactcaacgcaggactgccagctccactgccctgagccccccggtgccaggcccagcgggcagtgctggagccccagtggcttgggatggggagactgggactctgagctggcaatgttcctgggtgctggctgcatgcccgccatgtgctgggctccgggatccactggttcctgacaccctcacctgcccctgggggtgtggccatcttctagagagggaaactgaggatcagtgcagaatgtagggggagcccaggctggcccagggagcagttggcggtggaggccttgggcaatttcccgtgttcccactgagtggggctgtccctgggcctgggcggggacgccaccaactgccaaggcctgtgtataagggcagccgccgccttagccacagacctgccccgccatgacccggctgacagtcctggccctgctggctggtctgctggcgtcctcgagggccggtgagtgcctctctgtgccggtggtcccccatctgtgctagggcccggctgccagggcagaactcagacttaaagcacagagaaggcaagcggcttggcctgggtcacacagccagcccggcctggacgatcccgcgaaaggcgtgagggcggacggtgtgcgggactcaggggccccctgtcctcttagggagtgggacgatgggggagggtgggtccccccgcagccccactgggtggatagagctgaggctgcagcttcacacgccctcccggccactgtgtggattcttggggatctcagagctgtctccccccgacccaggctccagcccccttttggacatcgttggcggccggaaggcgaggccccgccagttcccgttcctggcctccattcagaatcaaggcaggcacttctgcgggggtgccctgatccatgcccgcttcgtgatgaccgcggccagctgcttccaaagccagtgaggggtcctggggagggggcctagggggcattggggctcagagaaggggcttggggggcttaggcattcagtgggggtgcttggtaggtgaggaggggaggggattgcaaaaggaggggctcagggaaaggagggggcttggagagggaaatggggactgagttgaggagggacccaaggatattggggggctcagatggaggaggcccagagaagggaagggggtcagatggaggaggcccagagaaaggaagaggctcagatggaggaggtgcagtgaaggaaagggggtcagatgggggaggcccagagaagggaaggggctcagatggaggagggggcccagagaaaggaaggggctcagatggaggaggtgcagagaagggaagggggtcagatgggggaggcccagagaagggaaggggctcagatggaggaggtgcagagaagggaaggggctcagatggaggaggtgcagagaagagaagggcctcagatggaggaggtgcagagaagggaagggcctcagatggaggaggtgcggagaagggaagggggtcagatggaggaggtgcagagaagggaagggggtcagatgggggaggcccagggaagggaaggggctcagatggaggaggggcagagaagggaagggggtcagatgggggaggcccagggaagggaaggggctcagatgggggaggcgcagagaagggaagggggtcagatggaggaggtgcagagaagggaagggggtcagatgggggaggcccagataagggaatggggtcagatgggggaggtgcagagaagggaagggggtcagatgggggaggcccagataagggaaggggctcagatggaggaggtgcagagaaggggagggggtcagatggaggaggctcagagaagggaagggactcagatggaggagggggcgcagagaagagaaggggctcagatggaggaggaggcgcagagaagggaaggggctcaagatgggaagggggccctggaaagtctcggctctgcttctgtaaaagcgggggagttttcagggtgaaggattgcagtctgcaggctgggatcccccctaatttgcaagccggcttgctctgtgcccaggccccagcctggtgtcctccctctgccctttcctccgctactctcaggaaccccggggttagcaccgtggtgctgggtgcctatgacctgaggcggcgggagaggcagtcccgccagacgttttccatcagcagcatgagcgagaatggctacgacccccagcagaacctgaacgacctgatgctgcttcaggtgagaggatggtgccacctgtgatcccagcacctcgggaggccgacgttagccagggaaacaagtccaaacttggtctctacaaaaaaatacaaaaattagccgggagtggtggcgcgcacctgtggcccctgtgcttcaggaggccgaggcggaaggacggcttgaggtcaggagttcgagaccagcctgggcaacatggccaaactcagtctctacaaaaatatatatgtgtgtgtgtgtgtgtgtgtgtgtgtgtgtgtgtgtgtatcttgccgggtgaggtggctcatgcctgtaatcccagcattttgggaggccgaggtgggcggatcacgaggtcaggagattgagaccagcctggccaacatggtgaaaccccatctctactaaaaatacaaaaattagccaggcatggcagcgggcgcctctagtcccagctactcaggaggctgaggcaggagaatcgcttgaacccgggaggcggagcttgcagtgagccgagatcgcgcccctgcactccagcctgggtaacagagccagaccctatctcaaaaaaaacttccaaaaacaatacagcaacacatacagatgtaccacggttcgcgtatggagcctcctgttggtggagactgacgtcgttttcaaatgcttttgctatgacagaatcatgtgaatgtttttcatgtttggtttttttctttgagaaaatgataaaattatctcaaaaatatcattaaaaaatttaaaaaagtagagacgggggtttcaccttgttggccagtttggtctcgaactcctggcctcaagtgatccacccaccttggcctcgcaacgtgctgggaatacaggcgtgagccaccgcacccggcccctgccgggaattaaacgcaaaccacttacagactacagttaatgtcgctgacacttctgctcccaggggtccccatgaggctccagtccccagggccaccctcccctgactccatttccttccccagctggaccgtgaggccaacctcaccagcagcgtgacgatactgccactgcctctgcagaacgccacggtggaagccggcaccagatgccaggtggccggctgggggagccagcgcagtggggggcgtctctcccgttttcccaggtttgtcaacgtgactgtgacccccgaggaccagtgtcgccccaacaacgtgtgcaccggtgtgctcacccgccgcggtggcatctgcaatgtgagtgctccctgtggcgggaggaggggtcctgagaggtactgagctctccgtggcaggagaaagcaagtgcaggctgagggcggcac[151 bp omitted]gcgattctcctgcctcagcctcctaagtagctgggattacaggcatgcgccaccacgcccggctaattttgtatttttagtagagacagggtttctccatgtgggtcaggctggtctcgaactcctgacctcatgatcgacccaccttggcctcccaaagtgttaggataacaggcatgagccaccgtgcctggctgagaaacagtagctatcaaacgccggctgtgagccacgtctgtgctgggggttggggacccagcaggcatggtagagccggtcactgagggactcaggcgtgtgattgccaggggaggggcacctggcccagcctggaggtgccaggaagctccagaaagcaactgatcccaaagtccactagcagttaaccagggcagagaaagagaagagccatgcaaaggccctggggctggatcaggacttgtaggttccaggggcagcaagaggcctctgcagttctggggtggcgtgggagccaggccctgggacgccctgacacagctgctgcctgcccagggggacgggggcacccccctcgtctgcgagggcctggcccacggcgtggcctccttttccctggggccctgtggccgaggccctgacttcttcacccgagtggcgctcttccgagactggatcgatggtgttctcaacaacccgggaccggggccagcctaggggggcctgtgacctcccatggagcccagccccgccctccacacctccggcgctccgcacccacctcccacggccccgcccctgcccccgctccggccagaggggccctggctgtaataaagaagccgatctctcctctgctcctggtttctgttcattggtgggggagggggctgtggggacgcgtgagtggcaccttcaccggccttaggggcacccaccgcaggtgcactgcctgtgcagatgtcagatgttcagagattccctcaaagcccgggaagcaggggctggtgttatctgcacccgacagcggggtgttggggggaggcccaggttcagagaggttgggtggctgcccagaggtcacacagtgaatgccgcccagcactttgggaggccgaggtgggcggatcacctgaggtcaggagttcaagaccagcccggccaacctggtgaaaccccatctctataaaaatacaaaaattagccgggcatgatggcgggcgcctgtaatcccagttacttgggaggctgaggcaggagaatcacctgaacccgggaggcggaggttgcagcgaaccgagatggcgccactgcactccagcctgggcgacagcgagactccagctcaaaaaaaaacaaaaaccacgggagaaaacggggaacattctcctcttggatccaatagaaacagtaaaacgtgaatatgaaataataaatataattgtatatataaataatacagaataaaatatgaatatgatggctggatgtggcagtcacatctgtaatctcagcactttgggaggccaaggtgggagcatcgtttgagcccaggagtttgagaccagcctgggcaacgtagtgaaaccatgtctctacaaaaataatttttaaaattattaaaattacacaggagaggccggg[138 bp omitted]gtggcgggcgcctgtagtcccagctactcgggaggctgaggcaggagaattgcttgaacccgggaggtggagattgcagtgagccgagatcacgccactgcactccagcctggtgacagagcaagactccgtctcaaaaaaaaaaaaaaaaagccgggtaagtggcacctgtcgtcccagctactctggaggctgaggtgggaagattgcttgagtccaggaggtggaggttgcagtgagccgtgatcgcaccactgcactccagcgtggtccacagagcaagacccagtctcttaaaatgataataataataataataataataataataataataagaagaagaagaagaagaagaagaagaagaagaagaagaaggaagaagaagaagaagaagaacctgtagtctcagctattgaggaggctaaagtgggaagatcactttagcccaagaggttgaggatgcagtgagctatttttatctcatttatttatttatttgagacagagtctccctctgtcacccaggctggagtgcagtggcgcgatctcggctcactgcaacctctgcgcccccagttcaagcaattctcctgcctcagcctcctgagtagctgggactacaggtgtgagccacaatgcctagccaatttatatatatatattttttagtagagatggggtttcattatg[139 bp omitted]aggctggagtgcagtggcgtgatcaaggctcactgtagcctcagcctcccaggcttcagcaaccgtgcccggccttagaattcactcttttaaagtgtgtacagccgggcgtggtggcccacacctataatcccagcactttgggaggccgaggctggcaaatcacctgaggtcaggagtttgagaccagcctgcccaacatggtgaaaccctgtctgtactaaaaatacaaaaaattagcctggcatggtggcatgcacctgtaatctcagctagtcgggaggctgaggcaggagagtggcatgaacccgggaggcggagcttgcagtgagccaagattgagccaccgcactgcaggctaggggatagagtgagactctgtctcaataaaataaaaaataaaataaaataaaatgaagtgtgcaattcaatggtcttcggtacactcacaatgttgtgtggtcatgacctctgttgagttccagaatatttcatcaccgccaaaggaatccctgtccccatcagccgtcactccctgtcccctccccagtccgcggcacccacgcgtcctcttcctgtctctgtggatgggcttgtcctggacatttcatagcaatgggatcacacactatgtggtctttcgtgtccggcgtctctcacggagcgtgacgtcctcacggtgcctccgcgccgtggtcgggtcacagctgggtccgtttcacggctgcgtcctgttgccacgcctggaggcctcactgtgctgctcgaggcccctgtggatggacgtctgagcctctccacttccggccactgtgaccctcactgctgtggacactcatgtgcaggtttgtgttggaactgctgcttttctttcttttgtgggtataacgggtccttttttttttttttttttgagacggagtctcgctctgtcgcccaggctggagtccagtggcgcgatctcggctcactgcaacctccacctcccgggttcacgccattctcctgcctc[175 bp omitted]cccggccaacgggttctctttacagagggggaaactaagcctagagaggggtgccaatggctcaggagcccagccggtgggggccctgcctgggtttggagaggcaaagccactgcctgatcattgttcagatggggaaactgaggcccaaggcaggattggggttcaagggcttctggtgcccccggctcggggccacgttcggtcatgagggtccccctgctggggcgggattcctgccagaggcggtttctgccctcctccccccagcccctgctgctcccccttcctgggcccaagggtgctgttctcgggttcccctggtagcggtcagcccggctgcagggccctcagagcggggctgcgtgtgactgtgggcagcccgagtcctctccgcgcctcggatttcagggacatagaacggggtcccatccgtggacccacccgccaccccgcagccccgtccaggccccgacgcgtgcagcccccaccccgcagccccgtccaggccccgacgcgtgcgtgcagcccccaccccgcagccccgtccaggccccgacgcgtgcagcctcctggcagagccagctgtgctcaggctaaaaacagctgttctgtttcttctctgtgcccctctacccggccccactcactggtgtcttgagaaggtttttaaattttcggaattctcagaacagattgtgaaatgtctgggtttggcttagaaatcccgtgagagggggcatcaggggacaggtgggtggatgggcctggggggtgtggaaggcggccgggtgtcagggccccaagcacacgggaaggtcaacggtcggcacaaaacacacacaaaacacaaccactgcgaggctgagcctcgcgggcgaaccagcatcttcccgtcactcagggagagaaggttttcc[137 bp omitted]tctactaaaaatacaaaaattagctgggtgtggtggtgggcgcctgtaatcccagctattcaggaggctgaggcaggagaatcgcttgtacccaggaggcggagcttgcagtgagccgagatcgcgccactgcactccagcctgggcaacagagcaagacttcatctcaaaaaaaaaaagaaagaaagaaagaaaaagaaagtagtagaggagagaaaaaagagagaacaagaaagatggagagacagagacggacagagacacagagacagagagagacggaaaaagagggacagagccagagagactgagagagatagttttaaaaaagggagacagcgatgacacagagagacacagacacagacacagagatgaagagacagacagatatagggagacagagacagactgagacagagagacagagacagagggagacagagacagagacagagaaggagacagaaagagggcggggagagagacagagacagagacacaggcctgagccccgcatgggtctcccctcggccccaggcggcgtcacctgcgatccctgaagccgttaccagttgcgccacctacggttggtacaggaaggggcccccactacctctgcccccaggccgacccctgcaaagcccccagcgtgttccacggaaccctccctgctacccgctcccagcgctcctgtcgccctggcctgtgcttttgagtccccccaggacgcacagggagcctggaggacccggggcccgcgggacggtgctgggaccctccggtcaggaccgggctgcatcagccttgcgtggaaacagatcctgacggggaagcccacgtacagtgaggacggggcagccccctgggcagctctcgcgtgtgctagatccagcagtgtgtgtgcaaggtctttcttttctttcttttcttttttttttggttgacagctttattgagatgtccttcacacacaccaagcaattcacccacttaacaattcggtagtggccagatggtgggggaggatcgctggagcccaggagttccagacgagcc[139 bp omitted]catggtgaaatcccgtctctactacaaatacaaaaaacaaattattcaggcgtggtggcaggtgcctgtaatcccagctacttaggaggctgacgcaggagaatggcttgaacccaggaagccaaggtcacaccactgcactccagcctgggtgacaagaacaaaactccatgtaaaaacaaatcaagaaacctcaaatccgtcgacccccactgctgccctgcagaaggtcctattaccgtcctcacccgcctttacaggtggggaaactgaggactgcaagccaaacagcttgcctcagcatgagctgactcatggctgaaaccaacagcacttttgttgaatgagaataacccttttattttgagacggtgtctcgctctgttgcccaggctggagtgcagtgacgcgatctcagctcactgccccctccacctcccgggttcaagtaattctcctccctcagcctcccaagtagctgggattacaggcatctgccaccacacccagctaatttttgtatttttagtagagtcggggtttcaccatgttgcccaggctggtcttgaactcctgaccttgtgatccatctgcctcagcctcccaaagtgctgggattacaggcaacagccac[137 bp omitted]tgcctcagcctcccgagtagctgggactacaggcgcccgctac[187 bp omitted]gctcatgcctgtgatcccagcatttggggaggtcaaggcaggagcgtccctgaaggctggcagttcaagaccagccagggcaacatagcaagaccccatttctacaaaaaattaaacagccaaccaaaaaaaaaaaaaaaaagaaagaaaaactttagctggacatggtggagcatgcctgtggtcccagctacttggggggttgaggcaggagaattgcttgagcccaggaggtcgaggctgcagtgagccatgattacaccactgcactccagcctgggtgacacagccagaccctgtctcaaaaaatatatatgtatattttaaaatattatatattatataatgtaaataatatacatgctacatattttatgtatacatctatgttatatacattaatatagccaggtgcagtggctcacacctgtgttcccagcactttggcgggattacgggcgggtcacctgaggtcaggagttcgagaccagcctggccaatatagtgaaaccccgtctttactaaaaatacaaaaaaaaaaaaaaattagccaggcgtggtggtgggcgtctataatcccagctatacaggaggctgaggcaggagaattgtttgaacccggg[136 bp omitted]gaccacgtggtcaaggttattaccatcagcacgagacaggccgaagccatgggcttcgacgtggggggcctgagacagacacacgccacgcccgggactccctccattgagtcctgaggccacccaggaccatccccacggagggacgctctgcagagtgaccaccagctctcctcaatggtcccaagggctgagggagggcagagggactgcgcccgctggaggagaccctgacatctgaagatgggtggcttgtgtacccaggacccagcaaagggtggctggtgatactcagggggctggggcagagggggccatttggaatcaactttcgcgccctggcttcgatcacagcctggagggttgagcaagaggacagaatttagggaagctgggggagggaggccgggggagggagtttggggagcggggagggagtttggaccctttggacttctgtaagcgtgaaatcctttccaaatgaaacgttaaaaagctttttttctttttggcctccaagttcattcagtgcttctctccatttcactgtaggtttaaaccgttcagttataaataaataattttatcctctgtcctcggctttcccccgtttccggcactgcagacatgggggctggatttgtctctgcggcggggccatcctgggcactgcagggccctgccaggagctccctccaagtcgtgacaaccacggatgtctccaggcctcacacagggacccctgggggcagaatcaccccagggttagaggattccacagaccccaagagactctgagtcccatgatcctctgccctgctgaggtcccaggaggctgcacacattgaaatccacaccctgagtgggagggagagaggaggcgagtcccgggagctggggtcccccgggtttatgccgtacgccccatcgggagtttattctggtgtccggtgtgagcagggggcagactggattttttattttttatttttatttatttatgttttgagatggagtcttgctctgttgcccaggctggagtgcagtggcacgatcttggctccctgcaaccttcgcctcccaggctcaagtgattctcctgcctcagcctcctgagtagctgggactacaggcgcccgccaacacgcgcagctaatttttgtatttttagtagaga[141 bp omitted]ctctcccctgggccctgtggacatcggggctggatccttctctggggcaggcccgtcctgggcactgcagggtgctaggcatcatccttggcctccacccactccatgccaggagctcccctttcgtgacagccacaggtgtcctcagacctcgcccagggtcccctgggggcagaatcacctcttgattgagaatcctggccttaaagggggaagaaaacccccagacaaaactggcaggaggatgttcgctggggcctcaggtgaggcactgagggcactcgtggtggggccctgccttcccgagctctgcatcctgtcccctgctacgtcctgctgtctgtccgtttccagctcacccacccacgggacacacctgccacggccggctttgctggggccacagggacctcgtcagggaggcgtctccttgtgggtggcacgtgggcatgtgttgctctgagggctgtggccatgttgcccacctggccagggacccccgacttgggtgggtgacagccagcctccccgcccccacaaaggttgggaccttgagcccaaagcccccacctcctccccggagtccgttctgactcccaggctcccaaggcaaaaggaggaagtggggacccagcctgggcattgggcaactcaacggcctctggcattgggctataagaggagcttgaccgtgggtgcaccctggaccccaccatggctcaccggccccccagccctgccctggcgtccgtgctgctggccttgctgctgagcggtgagtgagccacgtgcccatccatccagcctccaggccccggtggattgtggggaaatatccaccacgaggtccatccaaagcccttctggcacagctggggaaactgaggcagggtcaggggagactccactcactgctcgggaccaacgcttgcaggggtggggaggacaagggcaagggggagccctggccatttgactcagttgcctatctgtaaaacgggcaaaacccagcccttccctcctgaggagctgttttgggaattagctagtaacaggcgaattcctggacagcacccagccttcagcaaatgctcagtgaatatgcatgaatgaatgaatgagtgaatgaatgagtgagtgagtgaatgagtgaacaaatgaatgagtgaatgaatcaatgagtgagtgaatgaatgagtgaatgagtgaatgagtgaacgaatgaatgagtgaatgaatcaatgagtgagtgaatgaatgagtgaatgagtgaatgaatgagtgaatgagtgaatgagtgaacgaatgaatgagtgaatgaatgaatgagtgagtgagtgaaagggtcgaggagttagtgatgctggaatcaggggaagaagagagcatgggccccctcaggtccctatcctgaggg[134 bp omitted]gcctcccgagtagctgggactacaggcgcccaccaccatgcctggataattttttgtaatttttgtagagacggggtttcaagg[139 bp omitted]aggctggagtgcagtggtgcaatctcagtttactgcagcctcagcctcctggggtcaaatgattctcctgcctccgcctcttgagtagctgggattacaagcacacaccaccacacctggctagtttttgtatttttagtagagatggggtttcaccacgttggtcaggctggtctcgaactcctgacctgagggggattttcaatgcctcagtttgttcatctgcaaaatgggtctctttgttggctgatttttttttttttttttgcttctttttttttattttgttttgttt[132 bp omitted]tgcaacctgtgcctcctgggttcaagcgattctcctgcctcagcctcccaggcagctgagattacaggtgcgaaccaccacacctggctaattttttttttttttttttttgagacggagtgtcattctgttgccaggctggagtgcagtggggcgatcttggctcaccacaacctccgcttcctgggttcaagcgattctcctgcgtcaacctccggagtagctgggactacaggcacgtgccaccacgcccagctaatgtttgtatttttagtagagacagggtttcaccatgttggccaggatggtctccatctcttgacctcaggtgatccacccacctcggcctcccaaagtattgggattacaggcgtgggccaaccgcacccgaccaatttttctgcttctttaaaaacatttttttaaattttgttttagagacagggtcttgctctgttgcccaggctggagtgcagtggtgtgatctcagttcactgcagccttgacctcctgggctcaagcgatcctccctcctcagcctcccaagtagctgggacgacaggtgcacaccaccatgcctggctaattttaaaattttttgtagagatggggtcctcacaattttgcccaggctggtcttgaactcctgagctcaagggagcctcctgcctcggcctcccaaagtgttgggattacaggcgtgagccactgcacccagccacctggtctgcgtcttaaaagccttcctgactctcaggactgaaagctgccaccagggcgcctttggaaatcgtcgtaattataacccccccggcctgggcgctgagtccttcccaccagccagcaggcactgaccgggttgcagatcgggagacggaggctcggagaggcccaggggctgctctgccatcccccctttccctgcagcctgggggctccctgacgcctggactccccccctgcaggtgctgcccgagctgcggagatcgtgggcgggcacgaggcgcagccacactcccggccctacatggcctccctgcagatgcgggggaacccgggcagccacttctgcggaggcaccttgatccaccccagcttcgtgctgacggccgcgcactgcctgcgggacatgtgagcggccgcctccacacccctgtccgcccgccccgccctcttcctccagccctggcccggccactgtccctctgcccggggaggacccagctaagccccgtctgcagaccccaggccccgcgcgcgtgggcagttctggggggaggcccggggcagggtcgccgagggaggggtctggggctgcaccgcggcctcgggaagggccggctgtgggcggcggcgagtgtccagggcgccgaggagtgaccaccccacccccgcagaccccagcgcctggtgaacgtggtgctcggagcccacaacgtgcggacgcaggagcccacccagcagcacttctcggtggctcaggtgtttctgaacaactacgacgcggagaacaaactgaacgacgttctcctcatccaggtgggcgggcagggccgcgagggctcggaggggcacggccagagggctccgggacccccattcctgcagccagcattcattgagcacccactgtataccgggccacgaccgaggccgctgcagcctgggtccagtggcactggccgggggagaccgctccttggacaccaggccactcctcctccccgcctctcccccgcccgcgcctctcccccgcccgcgcctctcccctgcgcgcctctcccccgcccgcgcctctcccccgcccgcgcctctcccccgcccgcgcctctcccttgcccgcccctctcccctgcccgcgcctctcccctgcatgcctctcccttgcccgcccctctcccctgcccgcgcctctcccctgcgcgcctctcccctgcccgcgcctctcccccggccgctcctctcccccgcccgcgcctctcccccgcccgcgcctctcccctgcgcgcctctcccctgcctgcccctctcccctgcctgcgcctccgcccggtgtgctgttcccccagaaagccaggtgccctcgcctcctccggcgcctcccctgacctcactggaagtggcgaggacagccacagccctccccgattcactgttctccactgaaccgcgtgctcctctcattcatggggccctcctagcctcctcccacccagaaagatcagctccccagggcagaggatttttgtctgtgttgttcgttattggactcatgtggcttagaacgggactgggcatacaggtggtgctcagtaagtgcttggggctgggcactgtggctcacgcctgtactcccagtactttgggaggctgggatgggaggatcacttgaggccaggagtttgggagcagcctgaccaacctagtgagaccccatctctataaaagacattttttttttttttttttttagacagagtctcactcagtcatccaggctggagtgcagtggtgcaatctcggctcactgccacctctgccttccaggttcaagtaattctcctgcctcagcctcctgagtagctgggattacaggcatgcaccaacacgcttggctaatttttgtatttttagtagagacggtgttttgccacgttggccaggctggtctcgaactcctgacctcaagtgatctgctctcctcagcctcccaaagtgctgggattataggagagagccaccgcgtccagcctacaaaagaaaaatttaaaaatcaaccgggcatggtagcacacgccaagccactcatgagctgagatgggaggatcacttgagcccaggaggttgaggctgcagtgagctgtgatcatgccaccacactccagcctcggcgacagagcaagacccca[134 bp omitted]ccccgtgtctactaaaaatacaaaaattagctgggcgtgacggcaggtgtctgtagtcccagctacttgggaggctgaggcagcagaattgcttgaacccaggaggcagaggttgcagtgagccgagattgtgccactgcactctagcctgggcaacaagagcgaaactccatctcaaaaaaaaaaaaaagaaaagaaagaaagaaagaaaacatgaatgaatggccgggcactatggctcacacttgtaatcccagcactttcggaggctgaggaaggcagatcacttgaggttgggagtttgagaccaggctggccacctcacccaatgggatggctccgggaggttccagtgagccgagatcacgccactgcattccagcctgggtggcagagcaagactccatctcaaaagaaagaaagaaggaaagaaaatgaatgaatacaatagtgacaaatgggacaaagggggtcgtggggcccaggcggagggagcggcatccgcggcgttttgaggtggtgggtgtggtgggtgtggtgggagggcggcccgggcggccaccgtgacctggaagcagcgtctcaccgccgcctgccttctgccccagctgagcagcccagccaacctcagtgcctccgtcgccacagtccagctgccacagcaggaccagccagtgccccacggcacccagtgcctggccatgggctggggccgcgtgggtgcccacgaccccccagcccaggtcctgcaggagctcaatgtcaccgtggtcaccttcttctgccggccacataacatttgcactttcgtccctcgccgcaaggccggcatctgcttcgtaagtaaccgtgcccccaccccgggcaccgggctgccatgaggggaggagggcggcggccagggttccacgccacctcttagctgtgtggcttcatgctgtgcctcagtctccccacctggaaggtgggcacacccaacacccaacgggcaggctcagcggggtgggggcgctcacattgcacctggctgcttgggtgggtctgggggttccctgccccccactcccctctaggaccacaggaaggtgtgggagacccatccgccctcaccggcggccccttccagaatccaggactccaggtatccagcgggaggcccataaatgcccagttcctacgaaagacctcagcccctccctgctcacactttttgtttgtttttgagacggagtgtcgctctgttgtccaggctggagtgcagtggtgagatctcagctcactgcaacctccacctcccaggttcaaggtattctcctgcctcagcctcctgagtaactaggtgcacaggtacctgccaccgtgcctggctaatttttttggtatttttagtagagatgaggtttctccatgttgaccaggctggtcttgaactcctggcatcaagtgatgcctggctggtgctcacacattttaaagaaaattccaggccagcagtggtggctcacgcctgtaatctcagcactttgggaggccaaagcggaaggatcttttgagtccaggagttcaagaccagcctgggcaacatagcagggtggcatctctacaaataatttaaatattagctgggcatggtgatgtgagcctgtaggcccagctactcaggaggctaaggcaggaggatcacttgagcctggggagttcgaggttgcagtgagctatgattgtgccactgcactccagcctggagaacagagcgagaccctgtctcgagagaaagacagccagctactcgggaggccgaggcaggagaatcacttgaacccgggaggcagaggttgcagtgagccgagatcacggcactgcactccagcctgggtgacagagcgagactctgtcgcaaacaaaacaaaaacaaaacaaaacaaaacaaaaggagaaagaaagaaagagatagagagagaaagaaagaagaaagaaagaaaaagagagaaagaaagaaagaaagaaagaaaaagaaagagagagagagagagagagagagagaaagaaagaaagaaagttccatattggaagcattttattctgaaacagctgtggctaccccagcccccttcctggctgcctggggccagcccgggtgactggctgtccccatcctcccgggagactcaggtggcccctgatgggtgactggccgtccccatcctccagggagactcaggtggcccctgatgggtgactggccgtccctgtcctccagggagactcaggtggccccctgatctgtgatggcatcatccaaggaatagactccttcgtgatctggggatgtgccacccgccttttccctgacttcttcacgcgggtagccctctacgtggactggatccgttccacgctgcgccgtgtggaggccaagggccgcccctgaaccgcccctcccacagcgctggccgggaccccgagcctggctccaaaccctcgaggcggatctttggacagaagcagctcttccccgaacactgtggcgtccgggacggccccacccgtccccccacactccctcccacggggctccgggagacaggccggccctgcacctcaccccaccgtgacctcaataaacgttgaaactccccctggctcctgtctgtccttcccatatagggaggggagggggaactgcccaccgtgacctcaataaacgttgaaactccccctggctcctgtctgtccttcccatatagggagggaaccagggagaggtcccctgggttcaagtccccgagccccaaactcaggatggggggagtcggagcgggggatgggggcccaggttgcagggggtctctctcctggatgctcgtggctgtgggttctaacccggccccatcagggtggccctgggcaggttgttattcatctccgtgcctcagtttcctcatctggaaaatggactcgccccagacgtttcctagaactgtccctgctggctcagggactccttgaggaaggggatggggatggggaagcagcctggggggcttcctggaggaggtggcagtgccagagctgcatatcaaggtgtgaacagaaacatccgaagggctgccaggcagggggcacagtccaggcagagacctgagggctagaggccaggggacggggaggagggcaggcaggggagggatgtgggtgcaggggaggggtaatggggttggagcgctatttctcgtaggaggggtaggcagggcaggagttccctggtagaagcatgagcaatgaactgggtgggggggtggccagaggggaggtccgaggcggggaagaggtgggactcacagtccagctcaaagacgggcaagtggccactagaaggaggcattagccacagagaggggacgacctgctccaggacacgtgtagagaagaaatgaagctcattgctggtgttttttttttctttttaatatttttttgagacagagtctcgctctgtcacccaggctggagtgcagtggtgtgatctcggctcactgcaagctccgccacccgggttgaagcgattctcctgcctcagcctccggagtagctgggactacaggcacagaccaccacgcccagttaatttttatatttttagtacagacagggtttcaccacgttgtccaggctggtctcgaactcctgacctcaggtggtccacccgcctcagcttcccaaagtgctgggtttacaggcgtgagcctacttacttatttacagctggcctacttatttatttttgagacagggtctcactctgtcgcccagtctgtagtgcagtggtgcaatcttggcttaccgcagcctcaacctcctgggctcaagtgatcctcccacctcagcctcccgagtagctgggactacaggtgccaccacacccagctattttcttagtttttgtagagacggggtctggctgtgttgcccaggtgggtcctcagtgactctttacatatgaacacctccaggtcactgtaatcttagcaatctcctggcctcccagaagaccccacgtccccctcggagtctacacccgctgtgaccataacacccctaccttccctgccacagttaatggtgaaccagctct[137 bp omitted]tgcctcagtctcccgagtagccgggattacaggcaggtaccaccacgccaggctaattttgtatttttggtagagacggggtttgtccatgttggtcaggctggaattcccaacctcaggtgatacacccgcctcagcctcccaaagtgttgggattacaggcctgagccaccgcgcccggccagacaacactttcttagctaagaactttatgaacgtgaatttatttcatcctcttgacaggtttatgtgatggatcctacgattataattttacagaggaggaaactgagtcacggagagtttatttcaggggcctgaagttacacagtggccaaatggccacaccagaaccaggatatgaacccagcgtcggcacacttaataatgactgcacgtgagaatgtagtatacagctggtgctcaataaatgcagctgacgccaagtctgatctccgtgctggaggccaagccccttccaaagatacggcgtcccccacccctgaaatccccccacccccgacttgaaacagggctgtgtagacagtaggcgcttactaagtgcactgtggtgatgttaaggcagcaaggtgggaaccctgccaaaaggggaggggagaaggcagggtagtgtgtgtctgattaagctgaggacagggcagacatggactgagcgcctgctgtgtgccaggctctgggagggcagggccattgtctccctaacccgagagccatgggggtccacttgcctgtggtcacgtcaggactccagcctggcccaggctctgcgtgtccccgggtgccctcgccccgcctattcctggagacaggcccgttggttcccttcccctccccttgtcctggagccaggaggacgttggttcttgcgacagccttggcccggccgttgcagctggaacatcgtgggggagatgggaagaggaacggggcccggagcccggggctgggtcctgggaatccctttcccgcagctgggactccagctcccctgccagttcctccaggcggaagccctcaggcttggtcctcactccagcctcccggcctggacaggaattctctctccagcagccctgccagatgcccgcccagcccctgcctcaggcggggagggcttcagggaagctcaccaaggcagaagggcgggagagattgtcagagccccagctggtgtccagggactgaccgtgagcctgggtgaaagtgagttccccgttggaggcaacagacgaggagaggatggaaggcctggcccccaagaatgagccctgaggttcagggagcggctggagtgagccggccccagatctccgtccagctgcgggtcccagaggcctgggttacactcgcagctcctgggggaggcccttgacgtgcctcagttcccaaacaggaaccctgggaaggaccagagaagtgcctattgcgcagtgagtgcccgacacagctgcatgtggccggtatcacagggccctgggtaaactgaggcaggcgacacagctgcatgtggccggtatcacagggccctgggtaaactgaggcaggcgacacagctgcatgtggccggtatcacagggccctgggtaaactgaggcaggcgacacagctgcatgtggccgtatcacagggccctgggtaaactgaggcaggtgacacagctgcatgtggccggtatcacggggccctggataaacagaggcaggcgacacagctgcatgtggccggtatcacggggccctgggtaaactgaggcaggcgaggccacccccatcaagtccctcaggtctaggtttggcaggtttggcaaaaacacagcaacgctcggttaaatctgaatttcgggtaagtatatcctgggcctcattt[134 bp omitted]gaggcaggcggatcacccgaggtcagatgttcaagaccagcctggccgacagggcgaaacactgtctctactacaaatacaaaaattagccgggagtggtggcaggtgcctgtaatctcagctattcaggaggctgaggcaggagaatcacttgaacctgggaggcggaggttgccgtgagccgggatcacgccaccgcactccagcctgggcgatagagcaagactctgtctccaaaaaaataaattaaaaaacccacattgattatctgacatttgaatgcgattgtgcatcctgaattttgtctggaggccccacccgagccaatccagcgtcttgtcccccttctcccccttttcatcaacgccctgtgccaggggagaggaagtggagggcgctggccggccgtggggcaatgcaacggcctcccagcacagggctataagaggagccgggcgggcacggaggggcagagaccccggagccccagccccaccatgaccctcggccgccgactcgcgtgtcttttcctcgcctgtgtcctgccggccttgctgctggggggtgagtttttgagtccaacctcccgctgctccctctgtcccgggttctgttcccacctctccatagagggccccaccagtgtgggtccctcatcctcacaggggaggtgccagctgggacaaggagaccagaagagactgaggttctgagcggtgaagccaccaccaggagcccagagttggggtttgaaaaccggggagggggggggggtcgcaggtcgccctctgggttcaagtccaggtctgtctgtgccttggaggggcaccgtggggaggtccctttgcctctccgtgcctcagtttcctcatctgaacaacaggggtgcgaacggccccgatcccgtgggttcccggtgggggatcccgtgggttcccggtgggggatcccgtgggttcctggtgggggatccagaggccccgtggccgggaggggacaggctccttggcaggcactcagcacccgcacccggtgtgtccccaggcaccgcgctggcctcggagattgtggggggccggcgagcgcggccccacgcgtggcccttcatggtgtccctgcagctgcgcggaggccacttctgcggcgccaccctgattgcgcccaacttcgtcatgtcggccgcgcactgcgtggcgaatgtgtgagtagccgggagtgtgcgcgcccggctcggaccccgcgtcccggtctgtgaggtgggtggggggaggccggggccggggctgctggcgggggggggtccgtccagggcccgcggggcccctcgagcaccttcgccctcaggcccgtcgccggatggggacgacaaggcgcggctgagccccgacccccggggccgcccctgagccccgcctctccctccccggcagaaacgtccgcgcggtgcgggtggtcctgggagcccataacctctcgcggcgggagcccacccggcaggtgttcgccgtgcagcgcatcttcgaaaacggctacgaccccgtaaacttgctcaacgacatcgtgattctccaggtgccgccgggcggggcggggggcgcaggggcggaggccagaggcctggggagggtggaggctgcgacggaggggcgcgtcggggccgctcgtggggacctggggtggcatcgtgggctgggtggtcccctctccgcgcctcggtctgcacctctgtgaaacgggaaaatacccgccatgggccgttgaggggttaaatgagatcctgcagggaggccccgatctgctgtcaatcaacaaacttactgagaagggaggccccgatctgttgtcaatcaacaaacttactgagaagggaggccccgatctgttgtcaatcaacaaacttactgagaagggaggccccgatctgctgtcaatcaacaaacttactgagaagggaggccccgatctgttgtcaatcaacaaacttactgagaagggaggccccgatctgctgtcaatcaacaaacttactgagaagggaggccccgatctgttgtcaatcaacaaacttactgagaagggaggccccgatctgctgtcaatcaacaaacttactgagaagggaggccccgatctgttgtcaatcaacaaacttactgagaagggaggccccgatctgctgtcaatcaacaaacttactgagattctttgtgtctctccattcaccagtcctgtggcccagggcaggggccgcctctgtctttgggaaaaggggcaaaagtccccacctttccacccctgtccgcggcttgcagttctggttatttcctgggcgccgggccccgtggctcaggcctgtcatcccagcactttgggaggctgaggcgggtggatcacgaggtcaggtgttcgagaccagcctgagcaacatagtgaaaccccgtctctactaaaatacaaaaaaaaaaaattagccgagtgtggttgtgggtgcctgtaatgccaactactcaggaggctgaggaaggagaatcgcttgaaccccggaggcggagattgcagtgagctgagatcacaccactgcactccagcctgggtctcaaaaaaaaaaaaaaagattcctccctgggaagggttagagggagagtttccttgtcactaagttttctcatagctctcacccagtgcagtggcgcgatcgcagctcactacagcctccatctcctgggctcaagccaccctctcagcttggaatggggggtagctggaaccacaggtgccaccacgtgggtccaccacgtctggctaatatatatatatacacacacacatacatatattataaataataaatatatattttatttaaataaaatatataatatttataattattttataattataataatatttatataattataaatatcatttataattataatatttattattttataaaataataaatataaaatatataaaaatatttttataaaataataaaaatatatatatacacacatatatatatattttttgagacaagtctcgctctgtcgcccaggctggagcgcagtggcacaatctcagctcactgcaacctccgcctcccaggttcaagcgattctcctgcctcagcctcccaggtagctgggactacaggcgcccgccaccacgcctggctaatttttggtattgttagtagagacggggtttaaccatgttagccaggatggtcttgatctcctgaccttttgattggcccacctcagcctcccaaaatgctgggattataggcgtgagccaccgcacctggcaatttttttttattatttttgtagacatggggctttgccacattgcccaggctggtcttgaatgcctggcctcaagtgatcctcctgcctcgccctcccaaagtgctgggcttacaagcatgagccaccgcgcccggctgtagtttttttgttaactgagcacctactgcttcctgcactcaagccacatccagggacaacctccaacgccctgagccttggtgacggctcccactctacagatggggaaaccgaggcttgccttggggagcagagtgtggggtgggtatcctgccctgcaggatcccagaaccacagtggaacctgagatggggaaactgaggcccggagaggggagggtcatcatcactgccccgtgtgacgcgctgacgatctgtccccaccgccacagctcaacgggtcggccaccatcaacgccaacgtgcaggtggcccagctgccggctcagggacgccgcctgggcaacggggtgcagtgcctggccatgggctggggccttctgggcaggaaccgtgggatcgccagcgtcctgcaggagctcaacgtgacggtggtgacgtccctctgccgtcgcagcaacgtctgcactctcgtgaggggccggcaggccggcgtctgtttcgtacgtgccctgggtgtccctctgctccccacccgctcccagcccggactgcagcaacaggcaccgtggctagaccctaggagggacttcccaaccctgacaggcggcgggcaggtgggcagggcctcgcagtccagcttccccaccttgtctgcctccacagggggactccggcagccccttggtctgcaacgggctaatccacggaattgcctccttcgtccggggaggctgcgcctcagggctctaccccgatgcctttgccccggtggcacagtttgtaaactggatcgactctatcatccaacgctccgaggacaacccctgtccccacccccgggacccggacccggccagcaggacccactgagaagggctgcccgggtcacctcagctgcccacacccacactctccagcatctggcacaataaacattctctgttttgtagaatgtgtttgatgctccttggctgtgtgattgggtgttgaaaatggtcagtaggtcgggcgtggtggctcacacctgtaatcccagcactttgggaggttgaggcaggcggatcacttgagctcaggagttcaagaccagcctgggcaacatggcaaaacccccgctccattaaaaaaaaataaataaataaaataaaataaaataaaatggtccaagcctggcccagtggcttacgcctgcaatcccagcactttgggaggccgaggctggcagatcacctgaggtcgggagttcaagactagtctgccaacgtggtgaaaccccatctctactataaatacaaaaaaaattagcttggcgtcgtggcgcgtgggaggctgaggcaggagaatcgcttgaacctgcgaggcgaaggctgtagtgagccgagattacgccactgcactccagcctgggcaacacagagagactccgtctcaaaaaaaaaaaaaaaaaaaaaaaataccggtgcggtggctcgtgcctgtaatcccagctctttgggaggcccaggcaggcggatcatctgaggtctaaagttcgagaccagcctgaccaacatggagaaaccccatatctactaaaaatacaaaattagccgggcgtggtggtgcatgcctgtaatcccagctactcgggaagcctgaggcaggagaatcacctgaattctggaaggtggaggttgcagtgagccaagatcgctccattgcactccagcctgggcaacaagagcgaaactccatctcaaaaataaataaataaataaataaataaataaataaataaataaataaatataaataataatgataataataataataaacaacaaactagaatccagagtctcttgggcatctctggagtaagccaccaccagggggcagcacagccagggcaatgga[277 bp omitted]gacctcccaaagtgctgggattacaggcgtagccaccacgcccagccctgttgttatatcattttcta[132 bp omitted]caaaaccctgtctctactaaaaatacaaaaagttagcccagtgtggttgctcatgcgtgtaatcccagctactcgggaagctgaggcagtagaatcgcttgaacccgggaggtggaggtcgcagtgagccgagattgtgccactgcactccagcctggacgacagagcaagactctgtcgcaaaaaaaaaaaaaaagcaagaaagaaagaaaaaaagaaggaaagagaaagaaagaaagaaaaagaaagggaaagaaagagaaaaacagagaaaggaaggaaggaaatgaggctaggcgtggtggctcacacctgtaatctcagcactttgggaggccgaggcaggcggatcacgaggtcgggagatcgagaccatcctggctaacacggtgaaacccatctctactaaaaatacaaaaaattatccgggcgtggtggcggacgcctgtagtcccagctactccggaggc[144 bp omitted]gtgaagagaaaagccgggggaacctcgtgtgctgctccccctggggacaatgtctgaggtcctccccacaaggtatccccatccttctggtccccgcaccatggattaatgcaacgtgaatcccgctggcccctgtggggcagatgtgaaaaatggagctacaccatgagcaggcctgcagtcccagcacttctggaggctgaggtgggaggatcacttgagccccggaggtcgaggaggctgcagtgagctatgattgcaccgctgcactcgagcctggatgaaagagcaagaccctgtctgtaataaaacaaaaacaacacacacaaatccccacctcacaaaaggccctatggcccagattctgagaagtattttattttaatttttttgtagagatggggtctcgccgtcttccccaagctggccttgaattcctgggctcaagagatgctcctatctgggtctctcaatgtgccgggatggtaggtgggagccactgtgcccggccagccctgactctgttcatcagaacctgccctcagtgaacagtttgggagggggcgtgtgatccaggctccaccaacccaaggcacccttgagacttggctggagtgaggaagaattttaggaggggcccactgagccactgggttgagtgtggggtccctggaaacacaccaggggaggctggtgaggaaagaagccatcagagaagaaaggagaagccagaagcagacactggacattgttcaggcacctggatcaagccacacctgaaggcggacatccctgaactttccatataactttcatgattcaggctccacccagtttgtctgggttttcctgtcccttgtagccagtcttcccagctgcctctgccttggcctttccaactttctattcgtcagggtgtcaagccccagaggccacagggacagagacaaaggtgtcaagtgaccttcctacccccaacagaccttctctctaatatagaggaggaaaagaagggagggtagcaggacaagaaagtgggttgtttacacgctgtggcctccagctaggattgtgaaacaccctgggggactctgggtgtggtgaagttggggccggggtgggtgcagcccccctctctgcctcctgcccatctgagggactgccccccaccagggccagcaggctgtcaggctcacagaggcccgagggtctcccagcgacttgtcgactctggtgtgagtctggcaggaggtaacccagtcccggggagggcggaggctgggcgggcgagttcccctttccccagctgggccgctgcccacccggggagcggcccgccccctccaccctcataaaagcacccccagggccctgcctgggtcagtgtctcagccacagcggcttcaccatgcacagctgggagcgcctggcagttctggtcctcctaggagcggccgcctgcggtgaggaggcctgggcctggggtgagggacagggctgtgtaggggcgtggtgctcccttccgtcacacggacggtcctccagcccctccaggtgggcaggaagggggtgtctctcctcactaatggaaggctctgaacgctgaaaaattctagaaaattcagattggaaatcggaactttctggagtcagcttttcttgcagacagagtctgaacgtctgcgtggaaaacttcatctgcgtggctgactgggctggcccaggcactggctgggtcagccccatttctcttatgtccaactggaaggcactgcgcccagggtagggcgctgggatctgcccccggtccccagcccactgtgggttctgtactctggggcattcccgcccgagggtatctgagtttgcaacgctgaggggccccaagacggaaacgggattcttttttttctttctttttttttttgatagggagtctcgctctgtcgtccaggctggagtgcagtggtgcgatctcggctcactgcaaactccgactcccgggttcaagcgattctcctgcctcagccttccgaatagctgagattataggccacgccgactaaattttgtatttttttttaaagtagagacggggtttcaccatattggccaggctggtcttgaactcct[133 bp omitted]atcccgtcaggcagcctcgcccgggggaggagtccaccccgcggccctcacgcgcccgcccacccacagcggcgccgccccgtggtcggatcctgggcggcagagaggccgaggcgcacgcgcggccctacatggcgtcggtgcagctgaacggcgcgcacctgtgcggcggcgtcctggtggcggagcagtgggtgctgagcgcggcgcactgcctggaggacgcgtgagtgcccgcgccgcgcgggggaagagcccgggtgcggtggggggagtcggctggcaccgaccgcggactccgtccggtccccagggccgacgggaaggtgcaggttctcctgggcgcgcactccctgtcgcagccggagccctccaagcgcctgtacgacgtgctccgcgcagtgccccacccggacagccagcccgacaccatcgaccacgacctcctgctgctacaggtcggccccgtgtagcgcagtccctcctgcggcgctgggatccccggcccaccctcactccaccccgcctacaccgcgccccgggtccagcctcgacctctcctgctgcatggggaccccgccccacaacccccacaccctcaccccgggtctagcctcgacctctcttgctgcgctcggagcccccccaccctctgcaccctcaccccgggtccagcctcgaactctcctgctgcatggggaccccgccccacaacccccacaccctcaccccgggtctagcctcgacctctcttgctgcgctcggagcccccccaccccctgcaccctcaccccgggtccagcctcgacctctcctgctgcatggggaccccgccctacaacccccgcaccctcaccccgggtctagcctcgacctctgcggctgcactgggagccccccaccccccgctccccctgcatccccatcccggttccagcctcgacctttgcagctgcactggtgagcctcgcacccaccccatccccacctgcacccccacccagggtctagcctaaatctctcctgctgcactgagacccacgcccctgccctgatgcccacctcccccgtcccgtctccccgagcctagcggcattctccccagcctcgcacccccgcaccccaaccctgacgtccgcctccaccctcagctgtcggagaaggccacactgggccctgctgtgcgccccctgccctggcagcgcgtggaccgcgacgtggcaccgggaactctctgcgacgtggccggctggggcatagtcaaccacgcgggccgccgcccggacagcctgcagcacgtgctcttgccagtgctggaccgcgccacctgcaaccggcgcacgcaccacgacggcgccatcaccgagcgcttgatgtgcgcggagagcaatcgccgggacagctgcaaggtgagccttcaggcctgggaggagacgcggggcctgcaggccccgggaagggcctgcagagggagcgcgaagcggggggcaagtaggaacagggcccagggaaggggcggggcgcgtagggggcgggaactggaagatgggcggagcatgagggtggcccgtgggcggggcctgtatgagggggcggggcatgtgggtagggtggggccttgggggcgaggcctggagaaggtacggggcctctggagagggtggggctgaagaagggtcagggcgggcagaaagggcaggaacgggtgggatgtggaaggacctgtgggttagggtgggaatagggggcggggctcgaggagggggcggagtccagtaatagcgggactgcaagggggcgaggccaggaagagggttggggcatgaggggcagggcatggaggaaggggcggtacctgtggggagggtggggctggagaagggtcagggcgggcaaaagggcaggtggcagagaaagggtgggaggtatagggggcgggcacgtggaggaaggggcggggcatggggacggggcggggcaggtggaaggggcgggaacctctgaaggggcagggctggtgcggagcgggatccctgctgtggcagggaagagaaggggtcctgagcagggcagaggtttaagaccagccgaggcttgcatggtagccggggccaagattgggtggggcttaagggaggggcgtggcctgaggtgagtggggactgagcagagcaggtggccactgagacgcgttagggcagaagtgggatccacggcaagtcaaagcttggaagagcaggaatgaggtgtgggacccccatactggaaagggcttggagcggggtggggtcgggggaacacgtggtgaggttgaggccagagggggtgtggccaggagctgggggcgggcctagaggggcgtggcttgtggttgtggcctaggcgataggcgtggcgcggggctattgactagtgaagaccaaattaacacgggagggatgagcgagcattgtggggcgggagcggcagccaggtgagggggtctaacacgtgaggccggggtgggcgcgggccgcccctcacggccccgtcctgttccggcagggtgactccgggggcccgctggtgtgcgggggcgtgctcgagggcgtggtcacctcgggctcgcgcgtttgcggcaaccgcaagaagcccgggatctacacccgcgtggcgagctatgcggcctggatcgacagcgtcctggcctagggtgccggggcctgaaggtcagggtcacccaagcaacaaagtcccgagcaatgaagtcatccactcctgcatctggttggtctttattgagcacctactatatgcagaaggggaggccgaggtgggaggatcattggatctcaggagttcgagatcagcatgggccacgtagcgcgactccatctctacaaataaataaaaaattagctgggcaattggcgggcatggaggtgggtgcttgtagttccagctactcaggaggctgaggtgggaggatgacttgaacgcaggaggctgaggctgcagtgagttgtgattgcaccactgccctccagcctgggcaa[146 bp omitted]accccgtgtctactaaaaatacaaaaaaaaattagctgagcgtggtggtgggcacctgtagccccagctactcaggaggctgaggcaggaggatagcttgaacccgggaggcggaggttgcagtgagctgagatcgcaccactgtactccgacctgggtgacagagcgagactctgtctcaaaacaaaaacagaaacattaaaaaaagaggaacgcgggaagctacagataaaagcgcaagaacggagaatacagcgaagttccgggtccagcgcttccgtggggctgacgcggccacacggcggcgcccttgccacacacacacacacacacgcgcgaaggcccgccaggcatgggtgtcccctcctggtctggctcataccgtttccctttgcttaccaaggggaatgtgagcgtcttctgtgtgcaaggctgtgggctgagactcaggtgcacagaaacccttcgaggccgtgttcctatgacccatatcccataaggggaaactgaggctcacagggactgtgcgactctcctgaccttacacagaagctccaggacacagcctggactggagcccagagccacggagcctgccttcacaaaccaccctgggtgcggccagacccacaccaggacgacgagcagcggcacctgcttgctggaggccctggacctcaggtcacccttcttggcaaggccagggaggacacctgaggccctgtgccctttctcccacctggtggaggggca[136 bp omitted]cccatctccactaaaaatacaaaaaaattagccgggcgtggtggcggatgcctgtagtcccagctacttgggaggctgaggcaggagaatagcttgaatccaggaggtgaagcttgcagtgagccgagatagcaccactgcatttcaacctgggcaacagaaggagactccatctcaaaaagaaagaaaaaaaaaaaaaagagaaaagaaaaagtgactgatgggccgggtgccggtg[168 bp omitted]gaggcagaatggcgtgaacccgggaggtggaggttgcagtgagtggagatcacaccactacactgcagcctgggtgacagagcgagattccatctcaaaaaaaaaaaaaagactgatgatctgagaggcaggtccgctgggaaaaggggggatggattgatgaacactgtgcttgggtgtttttggggctatggaacactcacctaggaatcacactgacgtgcaagcacgtattgagcacttactgtgtgcagagccctgggccgggcacggtaagacacatctaagccccagccctgctcttaggaatttggtaaatactgcactgcacggaagggggcccattcagccgtctggtgaccaccacgaagttggagctcactgtgtgaatttcacgtttttgtttttgttgtttttgagacggagtctctctcgtcgcccaggctggagtgcaatggcacgatctcggctcactgcaacctctgcctgatggttcaagcgattctcctgcctcagcctcccgagtagctgggattacaggcatgcgccaccacgcccggctaattttgcatttttagtagagacggggtttctccatgttggtcaggctggtctcgaacttccgacctcaggtgatccgccccccctcggcctcccaaagtgctggagttacaggcatgagccacctcgcctggccacccagctaatttttaagatttttgtagagatgaggtctcgccatgttgccccaggttggtcttgaactcccaggctcaagtgatcctcctgcctgggtctcttatggtgctggtgcgtgagctgctgcatccggcctgcctgggcatctttgcatcctttggtccgcaggagctacggagggttccggaggaggagacggtttaggaggcggtggaacaggagtggtggggaggatgcaggacgggaacatctgggcaccacatagtcctctgagttgagacgcggtccagtctccgcactgccatatatatggcctctgtttcctcatctgtatctcggggccccaacgtccctggctcttagggagattttgaggacccctgggggaaccgcgaggcgacgaggaccttgggaagccgggggcggggacagcagagcttcagggccacaggccgcctctcagcacccccatgccctgcctgcctcgcccaccccactgtacctgagtgaggtagaagctcatgacagccagcttgtgacagtggtctgacagaccccccccccacctagtgacgcaaagcccaccccggctcaagtggtcaggaactgatgggaccagggggcatcctgtccccactccacgcgtccagacctcagccaggtcaccagaaccacggggggctggggtcagctagaggcattttcacttctgagtcgggcactgggtgactctgatctcccggcccctgaagctgcccacgagcctgcgtcccacaacgcatgggcaccctcaccagtgctcccatctcctccccgtccacccgccgcaggcctgcacccctcgccagcgctcccatctcctccccgtccacccgccgcgggcctgcacccctcgccagcgctcccatgtcctccccgtccacccgccgcgggcctgcacccctcgccagcgctcccatgtcctccccgtccacccgccgcgggcctgcacccctcgccagcgctcccatctcctccccgtccacccgccgcgggcctgcacccctcaccagcgctcccatgtcctccccgtccacccgccgcgggcccgcacccctcaccagcgctcccatctcctctccgtccgcccactgcgggcccgcacccctcgccagcgctcccatctcctctccgtccacccactgcgggcccgcacccctcgccagcgctcccatctcctctccgtccacccactgcgggcccgcacccctcgccagcgctcctgcactctggtctctgcagagccacatggaaacgccgcagacacccggacaaaagccgcccccaaccacccgccagggcccactgtgttctgtctgtcacttgctttggacacccctggcatccacaaggcgccccacacatgctgagtgactgggggagatggaggcccacacactcctgagctcgagaggaggtcgcaggagtggggccgggagctgccctagggtctgtccctcagaggatggccagggggacggtgagacggggctcggtgtcccagcagagcttggagtctgcggccgaggacgggggccttaaagtgggggggccttaaagtgggggggccttaaagtgggagtgcctcagccaggtgacggggtgcctgagctcccgcctcgcgagccggcactgggcactcaccccaccctcgctgccctccccagagctgcagaaaggaggagtccgtcggcacacagcaggggcaccactgtgctgggaaggcctgctggagacggaaggcgggacccctggggacagcaacagaaacggcagaaacttggcccaggggctaagcaacctccagcagagagcagctggagaaacataacagggacagagtcaggcagagacacagaaacagcatgcagagacacagagaccatacacagagaagtgcagagataccagagacacgcagaaacaaggagagcacgcagagacagtatagagacaggcagacaacacactgaaaggcagatgcctggacagaagccaccctgacgatggccgccccatcccatccaccggcctgctgtgtcctgtccccactgctcactttggatacccccagactcggcatccactaggtgccccataaatgctgaaggatttaaagacaggccaagaggacacaggctcccggcaccaaatcgaggtcgtgggtggggtcgggggcaccgacggcagggacgcgggcctgggcgcagagggcgtttattggacctgtccttcccagccgctgcttgtccaggttcagcgctctccgcgggtgaggcaaggaaaccgaggagacgcccgagccgggtcaccacaaggtccgcctggacccccggccgtcacggacggtcctctggatgcagatggtccagggatctgggggtcctgggagagtggtgtgtggactgcgggcccagctggacaaaggcaggggcttcctcagaagctctgctggtcacgcaggcgtccggcccacggccttcaacagccctgcagggcgggctgaggttaaccgcgccgaggagagtccagggcgagcggtggctcttgcagcagccgggctcaggggcagctgaggggtagctgaggagtagctgaggggcagctgggctcaggggtagctgaggggcacccgccaccagagcccaccgcacaggcagttcttgatccagcgctgctcccactgcttcaccgccgtggttctgttgggcgacttgagcatggtgacacagccgcacctgcggggaggcaggcactgagcgggttcccacttccaggcgggcctcccttacgcctgccccacttttgcttccaggcaggtctccctctgctcgccgtccctcacgcctgctccccacgtccccacctgccacagggcctctgcccatgcttctcctccccccagcaatgctgctccctgaactagccccgccacaccaagttaactgctccacatcctgggatcctggctccaacactccctctgggacgtgctccctccaccacccttgaccgtctggagcgctgggtgggggctagaatcagctgagccatccccagcggcacatctctgggagtcagcggttccgggggcccctcacctggtgcaggccttgcattcctccgtggggcaagcgccaaggtgcagcctccgcaggtggtcgatcttgggctggcctggggccctggcgggagaggggagaacgtgagggaggcctgggcaccacgaggccaggttccggcaggggcatctgtccacaggcgggggtggagggaatggccggcctcacaccatctgccaggtgggcccagatgtctgtgaacagtgaggtgggaggtgcgggaccacctgagacaggcccagtaaagggggcgggaccccccacacggaggagggttggtctcccaggtgcctggggagcttgaggcttagagacccagtaaaggggacggggcccacacagggacgagggtcggtccgccacgtgcccggggagcctgaggtgcagggaaggtgcttgtgacgctcccatttgaggctggacagaagcaggtacatggggacttccacaccacctctgcccagacacccggcctggaggtgccgggacctctgaacgacaagattctggtggcaaaagctgccctcggtggtgggtgggggacctgggtctgggtgggggtgggccggcttattctgctctcattaaatatctgaaattttcccagtttacaagcctctgacgtaaccgtcctctctttccatcaagtcttttcctgaaacccaaaccctcgtgtgtgactcattaggaggcccctcccacagtgagcacgaggaagaaaatgctggaggtcctagagccaagccagggcgccttcccggaggtcccggagccaagccgggggtgccttccctggaggtcctggagccgagccggggccttccccggagcagggctgctggaggttcacttcattttcttccttttgctcatctgtgttttctaaaattccagccctgagcaatcagtggctcagagggtttgcatgtgctccttgtcaaacgtgtgtctgaaacaggctgggggtctgacgggcctgggttcaaatcctgactcggccacttcctgaccgcgtgaccccagatgagtggggtgacaaggtcccaccctttccaggctgggtttcctcaccgtgaaatggggtgacaaggtcccacctcacagggctgctgggcagccagggtcagctcagcacacttgggttgcccaaaccccgcacattccagagaaaggccagccccgggccctgcaaggtgacctcttgcccccgggagatcctcctgatgaggtgtctgctcagcagggccctgggccatatgctaaggcgtctctctccatccacagagggatctacggcgaggcctgacatccaggggggccagagactaagggcagaggctaaggcagggcgccctgtacagcgaggccaacacacaatcaggaaacaccaaggcaaggccggggcggtggctcacacctgtaatcccagcactttgggagggcgaggcaggtggatcacctgaggtcaggagttcaagaccagcctggccaacattgcaaaaccgcctctataccaaaaatacaaaaaatacctaggtgtggtggctcatgcctgtaatcccagctactgggaaggctgaggtaggagaatcatttgaacccgagaggcagacgttgcagtgggccaagacggcactactgcactccagcctgggcaacagagtgagaccctgtcggggagacaaaaaaaaaaaaaaaaagggagagggtgaatggaagggctgggtgcccgtgttgggggtggttcgtgacacagcagaagacaccactaggggatggagttaggggcacctagaaggaagcagcagtcatggccatgactggagaacatggagggaaggagccgtatggattcgggggggtcctggggcaggacatggagggagggagccgtgtggattcggggggacccggggcaggacatggagggagggagccgtgtggattcggggggtcccggggcaggacatggagggagggagccgtgtggattcggggggtcccgggcaggacatggaggcggggagccgtgtggattcggggggacctggggcaggacatgcagggagggagccgtgtggattcgggggtcccggggcaggacacggaggaaggagtcctgtgtttggggaccaatgcagggacacacgcacctggcgaggccgtcgagctgcagggtggcagcactgccaggcagcgtgggcgcccggccaaactgcagacgaaggggctgcttgggctgcaggcggctaaccaggccgtcgctggctggcagccagtccaggctggggataagcagctggctgggcagcaggcagcattcatccaccagcgcctcgtccggctcgctcgctgggccctcatcgcgacctgcggagagaggtggcggaagtctcagcacccctgactggggcaccgcccggccacccgggacgtgctgggagcccctccagttcaggagcaccaggtcagggccccagctctgtctgcctggctgggtgaccccggggttctctcaccaggtcggggccccggctctgcctgcctggctgggtgaccccagagttctctccccgtctctggcctgtcatgagactccctcattcacttaaaaagtatgtgggaagcactgtgccttttccagacactgggatgtaagaatgacacagctcaccctcctcacatacacacaacccgacaaggagagacagcaaacaggtgcctggaagtggctgccatcccaaaagcacccacacagagcatggacctgtgctaggaactggggaaatagcagatatcaaggcagagccactgccacctgcaggggcttatgttctggcggggggctcaggcaggacttgtgttttggtagggagaggggagcggggagaggggagaggggagagcggggagaagggagagcggggagaggggagagcggggagaggggagagcggggagaggggagagcggggagcggggagcggggagaggggagagcggggagcggggagaggggaggggcgggcgggggtgcctcacagcagatccagagcttggtgagcaggcggaagagcagggacatgctgtcctgggtatccgaggtggccgtatacacgggcaggcagctgggcttcagaaggccccagatgcggatgaccaccatcaattcccgaagcatgcccagcgaggtgccgtcccgcagaaagctgtggcccggcctcagcagggaaccctgcccgaaagaggcatcggtgtggctggggcggcggggggcagatggcgatgggatgaagtgtcttggggtcggtggaaccccgaccggggggcaatgggcagggtctgggacatttgtggtggtcaggactggggtgcttctggcaccgagtgggtggatgccggggacgctgctcagagccctgcagggcccaggacagccccatttgcagagtcgtcccatccctgagagtccacaagactaagacgaggctctggctgaggccaatatccccacctgcacgtggaggagcagccgccccctcctacagctgcgggcccgggcccctggtgactgtactgggagctgagaggaccagggaagggaggccccaggggtggcccctggcagcctaaagccccacaaaaagaagagagggacttcaaaccgtccgtgatgggcgcggtggagaagggcgggccccagggcaggatgaagccgggtgggtggggcagaagaaatcacagctggggcaggacagagtgtaccggcgggggggtgggggcgaggttggagccctggtcaggggcgcacaagccgcagaactgaaggtggaggtgtggatggagacttgatttcaaggccgcccaccccaggcgcagggagctggggagggtaaggggtgggggcagcagcagcagaagcaaggcgaaccggccttcgtgtaggggtggggctgagaaggagcagggcctgggaggcggggctttgagaatgggcaggaagggtgtggccaaggaaaggcttcttacagcagaggcttcatggagaggagggctccgaggtgggggagggctccgaggtggggcagggctccgaggtgggggagggctccgaggtgggggagggctccgaggtggggcagggctccgaggtggggcagggctccgaggtggggcagggctccgaggtgggggagggctccgaggtgggggagggctccgaggtggggcagggctccgagatggggcagggctccgaggtggggcagggctaggaagtggggcagggctaggaagtggggcagggctaggaagtgggggtttaagaagagacagactcaggaagtgggactccaagtaggggtgggactccaaccaggggcggggctgaggtgggactccaagcaggggcgggactccaagtaggggcgggactccaagtaggggcgggactccaactaggggcggggctgaggtggttttgaggggcaggggcagggaagcggggtcctgatgagatgggggcccaggtggggggcggggccttaggggagagcatggcgcacctggttgggtaggctggccagcaggtacagcacgaagtcgcccacccactgcaagagctgctgcagcgcctgcagtgtgttcatgtccagcacaaattcctccgtcttgaggttgatcatgaccttgtcaatgtctacaaggagacgtgggtcgggtcagctcgggcctcttgtacacacagggtgacctaactgcacccctcggtccttcgacctgcactgagtgcccacccagtaccaggacacaaggggacccacaccgggaacgagaagggggcgatggcgttgccggacggagaggaactgggagcccactgcctgcccccccccgggggccgctgtgctcagcaccaaccagcttctctcggcctgcaggccttggcgtgggcaggtccccatgccagggccaccagtgctcaggcccggcctgctggtgcacatctgccccctgctccgaggtgaactctgtgaacacaggggcatgtccacagcgtgcagctgcagccacccccggctggcagctggcggcggttacacacccaacagatgcctctcggatggtgactagggtggtcccacagaactaaccatgactgtgcacacggctcccagctaccaggagtgccacgtgtccacactcaaccgggtactccagacaaacgataaccctaaattttttttttgagacagagtctcactctgtcgcccaggctggagtgcagtggggtgatctcagctcactgcaagctccgcctcccgggttcacgccattctcctgcctc[133 bp omitted]ggcctcccaaagtgctgggattacacacgagtcgccacgcccagcaaccctaatttttaaaagaaacagcctgccaggcacagtggctcacgcctgtaatcccagcgctttgggaggcagaggcgagtaggacaccacgtgctgggtgagcctgggcaagctgcttagcctttctgcctcagtccccttacggcaaaacggaaggaggagcagacctgcctgcacaggacccgggtgccgggtgtcggcctgggagcgtctcagcccccaggagtagagagaggtgaaaggatcgcttgagctcaggtggtcaagaccagcctgggcaacacagtgagaccctgttgctacaaaaaattaaaaaccgggtgtggtggcacgtgtctgtaatcccagctactccagaggctgaggcgagattgcttgagcccagaaggcagaggctgcgctgagctgggactgcgtcaccgtgctgcaacctggatgacacagtgagaccgtctctaaaagcctgggtgtggtgtaatcccagcctttaggctatatcccagcactttaggaggccg[135 bp omitted]gaggcaggagaatcacttgaaccagagaggcggaggctgcagtgagctgagatcgcaccactgcactccagcctgggcaacagagtaagaccctatctcaaaagagtaaaaaaaataaataaaaataaaataaatagatgaaagaaacctcgaggccccgggcgtggaaaaggacccaccgacgtcggtgatcttggtgcagatctcggtcagccggtcgccggggctcttgtcaggcgtgttgagaaagtgggggcgcagcagcgacttcagggtggagctgatggcgatgaggaagagcttggtgtggtagtcgcacacgcgggtcaccgtgcagggcgacagcttgcagagcgaggccttcatggccaggatccgggtggagaggacctgagggcaggaagccaggtcaccccaaggggccggagcagaggcgcccgccaaggctccagctgaggagaagagcagttcgactctgacaccaggcgctcggtcagctgggcaagctgcttcgcctctgcacctcagcaacctcatggcaaaacaggtgcggaagaccaggcgcacaggaccaggtgctgggttctcagctgggagcggctctgcctctggtgggggcccctggtgatgtctggagatatttttagttgtcaccactgggggtgcccctgccaagtaacgggtggaggctggggaggctgctcaacaggacacccccatcccagaggctgctccagcccccgatgtctgtggtgcctacggggagaccctggtctagagagaatgaatgaatgagctgaagcattttgggaggctgaggctggaggattcctggaggctgggagttggagagcctgtgcaacgtaggacaccccatctctacaaaaaatagaaacaactaaaaacaaaaatgaaacgcttggcacacagcgacggcccaaggagggagagggcgaggtctcgccatcactagcgctgtcactggctacggatcccagccacgctggggtttagcctcgcagcccccgcctgggtctcacgcgtttctcggcaggctgtgccgtgaatgggattttttttttcccattttatcttcgtattggtttctgatggcacagaggaaaacaagtgaagctcagagggctggtcccacgtgcagctgccggctgagctcgttagatctgaggtccttcgaggacactctgggattgcaggcacataaccacaccactgcaagggacccttctggcacgtgggcctccgtatccgctccctcctctccttccgacgggcgggtctctgtgtgttcatcttctgaccgtgtttgctgaggcctcacaccacagggccaccgggtgtgcatcctggtacccatcacattctgagaggatggcttagaaagatacctccagactgggaacactggagaggggagccgtccaggggggatcaggccttacctgtggggcttaacgtgttacagaagaaacttcccaggtaaggaaggaaactgcttctctgaggtgcagctttcctggacgggcctctgggagcacaccccacacgcagcctcacctgccacaggctacctgcccctcttgccctccgcctgccatagagcccccaacctgccgcagggaaacccctccagctgccacaacccccacatctgccgtggggacctctacaactgctgcagagacctcctccaccctccaagggaactccctccctgctgctggcactttactgaccacggggcccctgcctgccacagggacagccccacctggcacgggaccacctgccacggggcccccacctgccacggggccccacctgccacggggcccccacctgccacagggcccccacctgccacggggccccacctgccacgggcccccacctgctgcagggcagcggtctggcgcgtgtactcctcgtgcagcttctccaccaggctctgtaccatactgggctgcacgtgcagcaggatgtcccaccagtcgtagccggtcaccatgcagtactccagcaggaagagcaggtgccgcagcgccagccccacctccagcgggtggcccatggaaggtgagaggcggagcacgctcagctgccagagacagagcccaaggagagcccggtgagatggggctgcgccctcagccgggagaggaatggggccctggggctgcggcacgtgtgtggatctgtgtgcgcgcacgcccgtgtgtgggcctgtgtgcgcgcatgtgtctgtagcgtctgtacctttctgtcagggtcatgcacaatgcctctgggaacagggaaggaaacctccctgagccccgactgcactggatgccgagccaggcttacactcgtctgctttacctgaggagtctaccccgtgaaaggcggtcctctcaacagctcctagttacgaagctcctaatacgtgctgtgagccaccccactgacctcgctcaacaagacgaacccatcacacagacaaggcagcgcaggcaggggctggcgaggggcttgcacctgtggtcccttcccccgggggcgcctccctctggcaccctcccagccccagccccagccccagacccacgtgccccagcagctcgccttcccctggttgtcaatgcccaccagcccctgccccacgtgccccagcagctcaccttcccctggttgtcaatgcccaccagccccagccccagccccagccccagccccacgtgccccagcagctcgccttcccgtggttgtcaatgcccaccaagcccagccccacatgccccagcagctcgccttcccctggttgtcaatgcccaccagccccagccccacgtgccccagcagctcaccttcccgtggttgtcaatgcccaccagccccagccccagccccagccccacgtgccccagcagctcacctttccgtggttgtcaacgcccaccagccccagccccagccccacgtgccccagcagctcgccttcccctggctgtcaatgccccccagccccagccccagcgccacgtgccccagcaactcaccttcccctggttgtcaatgctcagcagctcaccttcccgtggttgtcaatgcccaccgagcccagccccacgtgccccagcagctcaccttcccctggttgtcaatgcccaccagccccagccccagccccagccccacgggccccagcagctcgccttcccctggttgtcaatgcccaccagccccagccccacgtgccccagcagctcaccttcccgtggttgtcaatgcccaccagccccagccccagccccagccccacgtgccccagcagctcacctttccctggttgtcaatgtccaccagccccagccccggccccggccccggccccacgtgccccagcagctcaccttcccctggctgtcaatgcccaccagccccagccccacgtgccccagcagctcaccttcccgtggttgtcaatgcccaccagccccagccccagccccacatgccccagcagctcaccttcccgtggttgtcaacgcccaccagccacaaccccagccccacgtgccccagcagctcaccttcccctggttgtcaatgcccaacagccccaaccccacgtgccccagcagctcgccttcccctggttgtcaatccccaccagggccagccccacgtgccccagcagctccccttcccctggttgtcaatgcccaccagccccagccccacgtgccccagcagctccccttcccctggttgtcaatgcccaccagccccagccccagccccagccccacgtgccccagcagctcacctttccctggttgtcaatgtccaccagccccggccccggccccggccccggccccggccgcagctccacgtgccccagcagctcaccttcccctggctatcaatgcccaccagccccagccccagccccacatgtcccagcagctcaccttcccccggttgtcaatgcccaccagccccagccccagccccacgtgccccagcagctcgccttcccctggttgtcaataccccccagccccagccccagccccagccccacgtgccccagcagctcgccttcccctggttgtcaatgcccagcagctcaccttcccatggttgtcaatgcccaccaagccgagccccacatgccccagcagctcgccttcctctggttgtcaatgcccagcagctcaccttcccatggttgtcaatgcccaccaagcccagccccacgtgccccagcagctcaccttcccctggttgtcaatgcccaccagccccagccgcacatgccccagcagctcacctttccctggttgtcaatgcccaccaaccccagccccacgtgccccagcagctcgccttcccctggttgtcaatgcccaccagccccagccccacgtgccccagcagctcgcctttccctggttgtcaatgcctaccagggccacgccccagcagctcgccttcccctggttgtcaatgcccagcagctcaccttcccgtggttgtcaatgccccccaagcccagccccacgtgccccagcagctcacgttcccctggttgtcaatgcccaccagccccagccccacgtgccccagcagctcgccttcccctggttgtcaatgcccagcagctcgccttcccctggttgtcaatgcccaccagccccagccccacgtgccccagcagctcgccttcccctggctgtcaatccccaccagggccagccccacgtgccccagcagctcaccttcccctggttgtcaatgcccagcagctcgccttcccctggttgtcaatgcccaccagccccggccccacgtgccccagcagctcaccttcccgtggctgtcaatccccaccagggccagtgacgtccacgatagctgcatagcctttaagtggacggcggggcccgcggtgcgggggcgcttcatggccggctcatccacaggcctcggggccgcggagctgtagaagacggccatggtctgcagtgagagccggtgcacgatgtggacgctgccgtcgtggaaggccagggccagccctgtggggcacaggcactgcttagacatgggcagggcccaggacacgcccgccgggggaggggcctcctgctctgcagggtgtggagagccggggctgcccatccagggggtcagcccccgccaatcggcatccagcgcccgtgcccccagccactctttctttagttacacagtccctgagcaccaggggagcaggagccagcagccttggccacactgctcccagcccctccccgcccctcccagctgggcccatgtcctggctgacacgcccctcaaggagcgcaggggaggggggcactacaggtgggggaccaagggttggggctcctggcgtcccaaagagaggcatcttagggtggtgggctggggctgtcactcacactggggtctgccattgtacgagggccggggggaggtggggtccagagcccaaagctcatggaaaagagaatatgaaaggagtccctgcagtagagaggctgcaaagccgggcgcggtggctcacgcctgtaatcctagcactttgggaggctgaggcgggcagattgcctgagctcaggggttcgagaccagcctgggcaacaccggtgaaaccccgtctctactaaaatacaaaaaattagccgggcgtggcagcacgcgcctgtagtcccagctactcgggaggctgaggcaggaaggagaatcgcttgaacccaggaggcggaggttgcagtgagccgagatcacaccactgcactccagcctgggcaacagaatgagactccaactcaaaaaaaaaaagaaaaaaaaaaatagagcctggaaaatggagcataaaccaagggttttggagcagggaactgcatcccctcaacctctctgcaggctctgaggaacagccctgagccccgagcgggttttgataaatgctctttccagggaaccagggaagaacgggagctgggggaagaaagggcctgagctagggccgacttgtccacattttacagctgagcaaatagggtaggcactgaagagtgtgcagactcactcatgggcacggatgccacggtttgagctcaggaccacattatggctgctgcagcacagagaggacacatgccgcctacccaggaaggagttccaccaagttccccaggctcccttgttgatttgcaatgactctttacatattaaagaacactggatctgtctgccagcctcacagatcccgaaagatgagatctgcctcctaattgggaacccatcagaacccagaaggctgagctcctacagccccatggcctgtgctcagagcccacgtcctctggtgtgagctcccacgaccccgtggcctgtgctcagggcccaactcccctggtgtgaactgaggccccgcgtggctgccgctggctccaccgtaccgaggccagggtagaactgtgtgtcgctggccaccttgaggtcggtgttggtgagcgagatgggcagcttgggcagcgccacggccgacacacggtccagatcgttggtggccgataggatccgccatttgagaattgtgggctgtttgtcgccaactgaaaaatcaggggcaggaaaacaggaaggcaatggagtaaagacaggctgagacagccgcaggagtccagcatggcctggtgtgcaacctgcccagggcccttcccaggtctcatgccgccctgctcccatgcccagaagaccaggcccggccaatccgagcgcttcgtgcctcggccactcattggttccaggatgggcacgtgacccaaggtgggccctgggatttcatggaaacctgtgggccggcaccatctcacccccgatggggcagacagtggggagacggcgccacctcagacctgcagccatgcaaaccctaacactcgctcggccttagccagctcagccgggattcccatccctcctcatctacaattccaataaagccatgcgggatggtcgcacccacagatccgctgcctgacagcccctgcgtgaagacgcagctcctcccaacagggcagagacttctgggaatctcaggccaagccttagcaaatgtgacatggccgggcacagcagctcacatctgccaccccaagactttgggaagccaacgccagaggatggcttgagtccaggagttcaagaccagcctggacaacacagcaagaccccattctctacaaaaaaaacacagtaaacattagctgtgtgtggtggtgatgcacgcctgcacacgcctgtagtcccagctactcaggaggctgaggtaggattgctcgagcccaggaagatgaggctgcagtgagccaagatcacgccactgcactccagcctgggcaacacagcaagagcctagctcaaaaacaaaaaacaaaaacagtggcccagagagcacgtgtggggggtcctgctgtggctgcatgtgggacacggagggcagctggagccggcctgctggagcatgtgcggccagtggacaggccacgccacctcggctgctaaccgcagacacgtgggaaccaggagagcgcagctgaggcagccacagaaacagaaacagtgcagggctgctggcctgagctgctcagtttggggctggcttgttactcggctgaagctgactaccacgcagctgctctgtgccacccgcatcatgaggtctctgccccggacgggccatcacggtcacagagccttgacctcctgcaaacccgtataggggtcctgtgagcagcattccctggggggaaacaggcccagagagtggctgagacgcccagagggcacacagtggtcaggggtggctggccctcatggaattgagcctctcataggaaagacaggaaactcaacgccccagcgccgggggaggcagctgccatgacgaccacacccccagctagtggccagggtaccctcacagcacgatttacatcccctcctccatccaactgacggctgcggtcagcattcctaaatgaggggggacttgaggcagggagaagctaagctgctaagtggggatgtggggcagtgggtgaagagctgggcatggtaggaaccgaagcctggcatggtgggcacgtggggcggtgcgtgaagagctgggcatggcggggaccgaagcctggcatggtgggcacgtggggcggtgggtgaagagctgggcatggcggggaccgaagcctggcacggtgggcacgtggggtggtgggtgaagagctgggcatggcggggaccgaagcctggcacggtgggcacgtggggcggtgcgtgaagagctgggcatggcggggaccaaagcctggcatggtgggcacgtggggcggtagggggagagatgggggagagatgggtgcggtggggactgtcccagtgacccccagctgccagggatgtgagacctgagaaaggctgtggcatgtgtgtgagacgtggctctcgggcgggtaacagctgggccagcaggtgaggacggctgcaggagacgaggaggagtgtcggagcccaggactgcccagtggcttggctgtgggcagatggtagacacagacgtgcccagcgggggcaccgggcagtgaaggtgcaggtctgtgcagccacacggggtggcgccaggtgctgctgcaggagccagcgcagcccaaactgcctggtgactcaccacgaggcccaggggaaggaatgaggcccaacaaggccctggggaccgggcgaaggaacgagccctgggagaaggaatggcagcagccctcttcacctgcctggtgactcactacaagccctgggggaaggaatggcagtggccctcttcacctttactgcctctgcggccacaatgggcagttgacataaccacctgcaggccccgggagccatcggggcctcttgacacgtgctcattagtggcttctgaggagcgcctgccccacctgccccacgtgcccccacgtctggccactccagggtccattagcgctaatcggcaaatgcctgtgctctcatctaccgggaaaacatctcccttctccagagcggaggccagcctaaaaaccaggcccgcagcctccgaggctctgaaaaccaagcggctgttctggtccccggtcatagcaggcgggcgtccctgcttcgctccagccccaggattttgtgccggaggtggggatgacgggcttggctccgtgggtgcggggggcccatcgggcggatagagatgggaatgggggccccagaagaggctgctggagaggtggggtggggtggggggcgtgttctcagcagcctcagctgacccgctgagccttggcttcctctccctgaaccaggttccggaggattccgtgcaccgcccctgcccggtctggcctgtcccctgctgcccgacggccccacccacagacccacgctccacagccgcccacacgcctgcagcccctcacggtgtccccgctggctgagcaacgacacctctcagcctcggcctcgcacagaatggtggcagccgccgcagcgggcgtggaaggatggaggagtctatacgcctaacacactcagaatgctggcaggcgcgcggtcacacccgagatcctagcactactggagatcgaggcgagacgatcgcttagggccggggttcaggaccaccctgggtgacacagcaagacctgcctccaaaataaaaaccaaccgcccccgagggcaggcccagggcctccgcagccggcgggagactcacccacgggggagatctgctggaagatgttgttcacggggagtccctccttgcgcagggaccagcactccacgatgctgctggtctggctggacgcgcacaaaagcacctgcgggggaggtgggggtgagggctgacccggcactgctgtggtggccacgccaccaccggagcctgagctgcgggaccctggggccacgcactgctgggcctgtctcttcagccacgcctgcccctcgggccctcctggattccagcccaggcctgtccccagagcccaacatccactcacaggaacgcaaatgtccccggatggtgccctcccacagggacagcaaagggacacagggaaccaagtcaggggcttcaaggagtttggggcgttactgattcctaattacaacaggaatccaggcgacctggtgtggtcggctcaacagtggcccccagaacatcccatcctcagccctaggaccggtggctgggccgcctctcacagagaagggacctgcgggtgggattcggttcgggacactgagacgggagagcacgttggggggggtccgggggccccagtgtcctcacagggtcctcaggagagaatgtgggaggttgagattcagagacaggaagaggctgcgctgtggccacgaagcgggaggaaggcgccccgaaccgagggattgggcgcctccagatgctgggaaaggcagaaaatgggttctcccctggagcccccgggagggaccggccctgcccacaccacggtttagcccgtggaggcccgcgcgggtctccacccccaggaccctgagaagcagtgcttcattccaagcctgccagcccacgtgatggcctgcgcccgttcacctgctccgacatgtcccgggccaggaacttgaggtgggtgatggcgggaaacttgtccttgcggttgaggtcggtggtgcagcgcatgaacagggagggcaggatctccgtgtcgatacggcacttctcgctcaccacgctcacgcacaccttgtagaactgcacgggcgacgcgctgctgccgtccgccgtggccaccacgatgttgccgccgccggtgaaggcgatgtcggccagggccacgcggccgcgcagccggcacaggctctcggtggacgtcagcacctgcccgctgggcttcagcagggacacggtgaccaggccgctgaccgtcaccgcgatccagccctccatgggcttgccgccgaacagcgtgagcgacggtgagaacttgactcgggagaacttctccccgaagctggaggcgcccgactgtggagaagggagggagggaggaggggccgctcaggctcatgggggctgccccatgacccccagaaacacgcgcacagaagaaccacgcagaagccaggagtgtgtgcacctgggttcagatcctgactcggccacctgagccgtgtgggatgtgatcccctctgaccctccgtctcctcatctgtaaggtggaaggaacggcacctttgctttagaggacagtggggaggattaaacgggtgaacgtgtgcgcaacgggagtcacctcccctttctgtaaagggacagacagcagcatgctcggttctgggagccaggtggtccctgttgcaacgacttggctctggctctgccgtggcggcacacaggcagctggtgccaatgagccacactcacaaacccaggcgggggccgtcaggccctgggccgcactgtgcagacctgagctatagcactcaggaagtgctgtgtaagcaccagcggctgctgcgggcactatttgatttcaaatcaaatttgtcaagtcattattgacatacggaaacatccacccttctttcaacgtgagtcttttaaaagatggggtcttggctgcgcacggtggctctcgcctataatcccagcactttggggggctgaggcaggtggatcccctgaggtcagcagttcaagaccagcctggccaacacagtaaaagcctgttgctaataaaaaatacaaaaaaattagccgggcatggtagcgggtgcctataatcccagctactcaggaggctgaggcaggagaattgctggaatccaggaggtggtgattgcagtgagccgagatcacaccattacactctggcctgggcaacgagagcaaaactttgtctcaaaaacaaaaaaaaaaagaacaagaaaaatgtctctacgttgtgaaaaaatgcgaggaagagaagtgtatcatacgtatcgtacggctccattctaagttacaagttaaaaaaaaacacttcttatagcaagaagcaggtccagaagtccaggaagcaagccaggcctggtggtgaggggttgccatggcgacgactcatctggtgtccacaccacacgtctgtgtgggtcgcaggctggcatgtctgagactatgttaaaggagcacatgtgccttttattaatgtaattaaaaaacaaaaatttggccggacgcggtggctcacgcctgtaatctcagcactttgggaggccg[132 bp omitted]gaggcaggagaatcacttgaacctgggaggtggaagtttcagtgagccgagatcgcaccactgcactccagcccggttgacagaacaagactctgtctcaaaaaaaatgtatttggttattttaaaaagcgaggctctgactcaggccacagcggggatgcaccttgaggacatcacgctcagtaagagatgccagacacagaaggctacgcagtgtgtgatcctgtttctatgaatgtccaggacaggcagatccagagagacaactgggtctcgggggctggggtgggggatggatcagggtgatgcaggatggggactgggtttccttttcgggtgatgagaagggactgaagctgggcacagtgactcacgcctgtcatcccagcactttgggaggccaagacaggcagatcacctgaggttaggagttcgagaccaccctgaccaacatggagaaacccggtccctactaaaaatacaaaaaagcagccgggcgtggtggcgggcgcctgtaatcccagctattcaggaggctgaggcagtagaatcgcttgagcccgggagggagaggctgcagtgagccgagatcgcgccactacactccagcctgggcaacagagcaagaccctgtctcaaaaaacaaacaaacaaacaaaaaagataaaggtctggccgggctcgttggctcacacctctaatcccagcactttgggaggctgaggcagacggatcacctgaggtgagaagttcgagaccagcctggccaacatggtgaaaccccgtctctactaaaaaattacaaaaattagccaggtgtggtggtgggtgcctgtaatcccagctactcaggaagctgaggcaggagaatcgcttgaacccaggaggcagaggttgctgtgagccaagatcgcatcactgcactccagcctgggggatagagcgagactctgtctccaaaaaaaaaaaaaaaaaaagataaaggtctgaggttagctatggtggtggccgcacaacatggcgagtgtatacgaaacctctggaccgtgtgggctgcacactctcaatgggtgagttctaaggtctgtgaactccatcccgacaaaactgttaccaaaaacaggaaatacagacaaacggggaccgcagggtggggagtgcaccccggagggcccccgtggcacgaagccggtgctgcgtgtactgcggcaatgcgccgacaatggcagtccctggggagggactcacgaagggacgagagaaaagatcttgtccactgcatccctccaggaaggcctcctagttcctgcgagagccccagcacaagcagacgcacagaggcacgaagctggggtggctgtgaggcctttgccacgaacatccccgagaccctgccgtcagtgaggaaactgacacacagaggtgaggagtcagagcctgaacccaggtgcccccccaaccctggccacgcctactcttaactgtcccccccaaccctggccacgcctactcttaactgtccccaaccctggccacgcctacttcttaactgtccccaaccctggccacgcctactcttaactgtcccccccaaccctggccacgcctatcttaactgtcccccccaaccctggccacgcctactcttacctgtggggccgaatcacagggagcatagagaggggctctgggatgttactaaatcagagggtgggctgcattcagaagacagcagccaccagttatacatgcagctacctaaggacagtagcctccagtgaaagagataactcactaagaacggccaccctcagttaaatgaggggccactgaacacgcaggtgccaatgacagccagactgcaggtgggggccaagtgaacagccaccctcagttaaatgagaggccactgaacacacaggtgctaatgacagccggactgcaggtgggagccaagtgcaaggtccaaaaaaccaggggatgctggtgatggagaggagaggggctggcgggtggctgggtagggtgacatctcatctgcctcatccgctcactcgggcaggacactcaccttctccacgtgcagggccagtttcacaccattgtgcagccaggacagggccacaatggggtccccctccactaggctgcccactgagctctcccagctattagccaggtggtccgccatgctccagcacttgatctgcccgtcggcatctgctgacaggagccgggagcctgagggcaagaagccatcattgcgaaccttccagggatgggcagagcactgcgttgcaggacggcacagcgcctgggggaagccagcccagtggagaggtctcggcccaggtagggcacagcaggtggcacaaggcgcactccagagatgccctgagacaccctgaacaagaatgattcgggccactatggaaagagcagcaggtgcaaagctgcagaccaggggctctagacccagcgccggactccagactgaccggagaaacacagggcccccctgctccgggatccgggtcgccacccctggccacgtgggaccagcgcctcacctgactggtcccactccaggcaggtgatggcctcgtggtgctctgaggggatcgagtgcaggtcccaggggtgctccgtgtccaggatgtggatcatgcgggtcaggtctgtggggacggggcatggtcagcacggcctggcaccacagcctgcagacgatgacgatgactccaggcaggctccaggtaagccggtgtgtgtcccaccccaggaaggtcacagaactgctgtcagccgagtcgacagctcagggaacaggctgtccccccgcaggaacagagcaggcctgtgaggcgccacaactgtgtctttaaaaccagattagaagaaaatgactccgaaatgtgaacagtgggagcctctccacagcagataataggtggcttttttgcaccccgatttgattccaattttctgtggttttctagttttctctaatgaccacgtattatgagtgcctattactcaaacaatggagagaagacgggcacagccaccacgcacctttcaaaaaccagtgacacacaccgtctagaaaactggggcacgtgtctccaacaagcctccgtcaaccaacgctccagcccgattcgatcccgcacacggggcgatctcatgtctcctggcaccaggtttggggggcactgaatccaccctctgtacccccaggaggctgaggctctcacacaagttacagaggagggccagggtgagtgagaggtggcctgagagaccgagtcccttcaaggcagtgggccgggcacctggggaacagggcgggacaccatgcggccgggaggggaagcaggtgggagggggacgcaccctggtcatcgctgcgcaggtccatggtgaaggcgatgagatttcggcaggaccaggcgcaggccaggggcaccgatgggcagtgggtgctcttggaccatttctcccactcacagacgtaggccaagtccatcatcccacctgccgctggccgccgcaaatcacacatgagggcagtcaccagctcctgcgggagggaggtgtggtgggacgtctatgttggctgagcacccagggcatgtggagtgccaggccagaagtgggaaaacaatggaggcccgtggtagagggaacagccgatgcaaaggcccggaggccagacagagcctggggctggggccgagggggaacatggagaggtcagggccagtcctgggcctgtgggcttctactctcagtaaggtgggagcccgggagggctgggacctatttgggtttcaccaggacccctctggctgtctagggaacagaccatgggggccaagggcacagccgggagacgcagcggagggtctgcgctggcccaggtgagtgatgatgggggcagcaagtggacactagctctctcccgaaggaagagcccgcagacaggcaagcggtggggcggctccctgtagccgaggcggggctgagtgacagggaacacctgtggccgaggcggggctgagtgacagggaacacctgtggccgaggcgggggctgagtgtgacggggaacacctgtggccgaggcggggctgagtgtgacggggaacacctgtggccgaggcggggctgactgacagggaacacctgtggccgaggcgggggctgagtgtgacggggaacacctgtggccgaggcggggctgagtgtgacggggaacacctgtggccgaggcggggctgagtgtgacggggaacacctgtggccgaggcgggggctgagtgtgacggggaacacctgtggccgaggcggggctgagtgtgatggggaacacctgtggccgagccgggggctgagtgtgacggggaacacctgtggccgaggcggggctgagtgtgacggggaacacctgtggccgaggcggggctgagtgtgttggggaacacctgtggccgaggcgggggctgagtgtcacagggaacagagggggcacctcctcgaggctttctaagcgcctggcatccagacgggctgtttcgcttcgcaaaggcaaaagcccagggagcctggaatcacccgcaaccaggttctcctcaaaccctaaccccggctccctacttcttcagggcctgccccagacccccaaggctccgccacaagcctctaaaagtctttcagccccacccctgaccccctttgcttcccacacttcatttcaccccttgagcccacggcctcaccctaaattctcaggcttcaccgtaggggtcccatgtactctccaggtccagcctccaacgcccttagctctccaggcccaacccctaaaactccccagtccccagactccaccccggggaccccacgtactctccaggcccttcccctattgcccccaaatacgaggcttcatcccagggaccccatagcctcttcaggccccgcccctataacccccaatctccagggtccatcccagggaccccctaccctctccagacccctataactccgcagtccccagtctccaccctagggaccctattccctctccaggccccgcaccgataaccccgcagtctccaggccctgcctctacagccccccagtccccaggctccaccccggcgaccccaaacccactccaggccccgcccccgaagtcccaccaagcgccttcagcctcgccccaaactctccttaggccccgccccgaacccagccccgcgggcctcaggcctcccccaggtttccgccgcaaaccctgagccccgagccccgcgccccgcgccccgcgccccgcgccccgcgccccgcgccccgcgccccgcgccccaggccgcctacccagcagcctttgctcccggccacgcccccgaccccgcaggccccgccacggctgcgccgcgttccctcgggtccgtggacacggtcaggggtccgtccgccctcgccgggcccccgcagccccgcactcacctggtcggcccgtgcgccaagctcagcgggcgtccgcggtgcgatcttccctagcgcctcgggtctggcgccgccatcttcctcggtaacaaccagtcgcctgaggcgtggggccgcctcccaaagacttctgggagggcggtgcggctcaggctctgccccgcctccggggctatttgcatacgaccatttccagtaattcccagcagccaccgtagctatatttggtagaacaacgagcactttctcaactccagtcaataactacgttagttgcattacacattgggctaatataaatagaggttaaatctctaggtcatttaagagaagtcggcctatgtgtacagacatttgttccaggggctttaaatagctggtggtggaactcaatattcgtgctcgcttcggcagcacatatactaaaattggaacgatacagagaagattagcatggcccctgcgcaaggatgacacgcaaattcgtgaagcgttccatatttttttttttttttccattttccctcccagaaacggaatcttgctctgttgcccaggctggaatgcaatggcgcgatcttagcttgttgcaacctccgcctcccgggttgaagcgattctcctgcctcagcctcccgagtagctgggattataaacatgcgccaccacgcccggctaatttttgtattttggtagagacggggtttcgccatgttggccagggtggtctctatctactgacctcctgatccgcccgcctcggcctcccagagtactgggattacaggtgtgagccaccgcgcccggcctttcttccattttctaatgtccaagagtggggaaactgtaagcgaagtcaccgaccccgttgagtattcctacttccaaccctattcccacctcctcctccaaaagccagtttaatgcaatggatgtggtgctcttctatttttatttttattttttttgagacagggtctcgctctgtggcccaggctggagtgcagtagcgcgatctcagctcactgcaacctccgccttccaggctcaagcgattctcctgcctcagcctcccgagtagctgggactacaggcgcgcaccaccatgcccaacaaattcttgtatttttagtagagacggagtttcacca[139 bp omitted]gcccaggctgatttcaaactccaggcctcaagccctccttccaccccggcctcccaaagtgctgggattataggcgtgagccaccgcggcctcactgcatgatttttgcaagaattctgcaaatataaaactgttctaaaattacaggttaacaatggcccaaatatcagagtgttttttctggatcagggttcagttctccaagagggccacgcagtgaccttacagaaaatccccattcccaggcagcaggtagggatttaacgttcttagcggcccgggtgtggtggcacacacctgtaatcccagtactttgggaggccaaggtctgaggacagcttgagtttgagaccagcctgggaaacatagccagaccccgtctctacaaaaaaaaattaaaaattagcagggttggggagggaggggcgctgggcaaggtggttcaggcctgtaatccctgaactttgggaggctgaggcacgcagatcacctgagaacaggagttcgagactagcctggccaacatgttgaaaccacatctctactaaaaatacaaaaatattagctgggcatggtgacacatgcctgtagtcctagctactctagaggttgaggcaggagaatcacttgaacccaagaggtggaggttgcagtgagctgagatcgcgccactgcactccagcctgggggacagagcaagactctgtctcaaaataaataaataaataaataaaatagctgggtggggtgatgcacacctgtaggcccagttactcaggaggcaaaagtgggaggatcacttcagtctgggaggtcaaggctgcagtgagctgggattgtacctctgcactccagccagggcaacagagccagaccctgtctaaaaaaaaaaaaaaaaaaaaaagagaggttgaattcctaactcccactacctcagaatgtgaccttatttagaaacagggtctttgcagaggtaatcaggttaaaaggaggtgattagcatgggcctaacctaatgacgggcatcatagagatggatatttgggcacagacacgtgaggagaggacgatgtcaagacaagacataacacacagggaaaacggccacttggagatgagaccacagcaatgtggccacaagccatggacacacgaagtccccagaaaccgggaaaggcaggaaggctcctcccctagagacgctggagggagcactgccctgcagacaccatgacctcattcttctacctccagcattgtgagaggatagatttcccttttgcttctctttgacctagggtcttcctccatacccaggctgaagtgcagtggcacggtctcagctcactgcaggctcaagtgatcctcccacctcagcctcccaagtagctgggactacaggcgcacaccacaccctgctaatttttgtgtgtgtgacagagttttgctcttgttgcccaggctggagtgcaaaggtgcgatctcagctcactgcagcctctaccacctgggttcaagcaattctcctgcctcagcctcctgagtagctggcattacaggcatgcaccaccacactcggttaattttgtatttttagtagagatggggtttctccatgttggtcaggctggtcttgaactcctgaccttgtgatccacccgctttggcatccccaaagtgctgggattacaggtgtgagcagccaccatgcccagccaaccctgctaatttctctcatgttttgtagagacaaggtcttgctatgttgccctggttggtttcaaactcctgggctcaagcgatcctcctgccttggcctcccaaggtgctgggatcacaggcatgagctactgcactggccttctgtcgtttcaagccccctgtgtgagaccctccattacaggggccccaaggcactcgtacaagccactcactcaaggtctacaggggccccaaggcactcctacaagctcctcacccaaggtcacacggcaggcatgtggcagagccagggtttgaatccaggcaaccaagggcagaggagccaggggggcacctgcagcccttggtggccaggacctactaagcccccggccctgccccgaagaaaaacacacatagcccgaggccagagcaccagaaatttattaaattccccactttcccccaaaacacaattacccacacgcagcaagggggtgcggaggccccccagcctggctcctgcagcctgggccaggaggaccagcatggggacacaggagctatcaggcaggagtcaggctgggggacgaggggacacgggatggggtgacagacaaggtagtgcaagggcagaggcttctggctggaagtcctggacccccagcataaaggaggggaggaaaggaagggggctcatataaagcaggagaccctgagccccgacacaggtggcgtgggggaggacacgcagaatgacgaggataaaaccggctcttaggaccgtggcttctgtcctgggtctcagggcacacgcgcgcacacatatacaacacaagatgcttctggcatgaggggcagggtcccagagaccccaccctcattcaagctaaaaactgggaggggctgagcaggggctgggaccaagacccatgttttaccagtggggcgagtttttttggtttttctctccaaaagggaaatttaaaaatctacaacaaatcacaccaaattcattaaaagtgataaaaacccagcctccccctcctcacttgagcttcagaccgggccagaaaagctcaacgatgaagaaacaggaacatgcccaggtcaggtctccccacccaaacacaagtcccggagtgggaagcttggagctgggatggcatgggcagccccagccgccagcgtctgttgactgccaagagctgcgtgaggagggggcagagtgagagagaccaccccaagcgaaaaaggtttccgaggacaaattctaaaaatatgaaagatattttagccgaaggtatcggagggcttgatggctgggcgaggtggcagcggggtctccgcggggccgccatcagctgtgctgctccaggtaggcggacaggagcagccccggcggcaggaaatccaggtgccgattactgaccttcatctgccgcttcccctccaggtcagcacctgcagacgggaccagcggggcaagaacgggaggaatttgggagccgcggcaggtagaggtgcctcggacctgcaccaccctcgcttcttcccagggaggtcaccgccagctggtgtgtgctggtcactgcggcctggctggccctaagcccgcaggtccgggagcctggctcacaagaatacctaaggctccctacaggagcactctcctcgggcccatctcactccccgctggcactcattccactgtgcggatggggaccctgaaacgcactgggcctgaggccgcatggccactcacacgcctgcctggcggagtgtccggcctcccctcaggctccctgccctgcagaggtggctctgaggcacccaggtcctgagtggtccagctcccaccggcctccccttccccatctccccctcactgcagaaaaatgaatgacctggccaggcgcagtggctcatgcctgtaatcccagcactctgggaggccaaggcaggaggatcatctgaggtcaggaggtcgagaccagcctgaccaacatggtgaaaccctgtctctagggctgggcgcggtggcttaagcctgtaatgccagcactttgggaggctgaggcaagcggatcacgaggtcaggttgagaccatcctggctaacacagtgaaaccctgtctctactaaaaaaaaaaatatatatatatatatatacaaaaaattagcagggcgtggtggcgggcacctgtagtcccagctactcgggaggctgaggcaggagaatggcgtgaacccgggaggtggagcttgcagtgagctgagatcgcgccactgcactccagcatgggtgacagagcgagacttggtctcaaaaaaaaaaaaaaaaaagaaacccgtctctactaaaaatacaaaattagccgggcgtgctggccggcacctgggatcccagctactcgggaggctgaggcaggagaatcgcttgaacccggaggtggaggttgcagtgagtaaagattacgccactgcactccagcctgggtggcagaatgagactgtctcaaaaaaaccaaacctaaccaaccaaaacaaaaaaaaagagccacgtcccatgtgagctccgcgcctcagcagtcccctctgcctgggacccccccgtcctctactccccatcttgctgggacccctcctcttccgtgtcaggaccacagctccacacccaccaagctccaagccccgcacccccagccaaggccggatgttctgagcagaggcaggcatgggggctgcgtctcccacagagggaacagagggaggcatcgtccggttgccatggaaactgtcacctcggcaactccaggcggggcggcagagacaggtgtgagaggctcaggaccagatggggtgcctggggccggcggcgcctgcacagacgttcactacgggggtgagttctgagactgcgccccgttggaaaagtggagcgcaggggccagtagggggtctcgcctgaggtcccacgtgtggtatgtgggaggccttagagttaaatgcaaaccttccagacactgcgtccccccatcttatctctggctctgggaggtccctcaaatccaggcttcatcacccccaccccgggccccgaagatgcagatggaggagtgtctgtgtccagcagcctggttgtgtctgcggtcaccctgcgtggggccgcatatgcagggagcttctggtgaattcaaggcagggtcccactgccacccctgagttcgtagcgtccccactccagcccccttccccacctccccaccaagccccactctgaggaaccaggcccctgggaccctggccactttcccaggttgagctggccaacttggggtcttgggggccaccggcacttactggccgagatgaggtccatgtactggcagacagcgtgcagcagaagcctctcgaagctgtggggaacgggcagtgagcgccgtgcaggggctgcagcgtggggtgtccgcccacctggccgcagcctcggagggtccgctcgcctggccgcccccccttacctgttgtctagcattgctgtgtacacggcctggggggacacggagaagaaccgaagcagccgctcctcccaggtctccagcgtttcctggggagagcggcccggtggtcagggaactgcgggacctgtgggtggggggccagggaggtccagggcccccaggagcccacagcgctgggctcaaacatgacctctgacccaccacgtgaggctgcttaagtgtctctgaggccaccatgccacctcctgcctgtgccttccgtggaggaaactcctacacaccctgcagtgcccgccttcgttgcccccgccctcctactcagggccctggtgccgctgtctgtatcctgccctgtttcccctgacacgacctgcaccgggtgagaacctgtgcctgggaaacgggccttcaaaaaagaccaggcaggtagaaaagggaggcccggcaatcccccactcaccatggggatgcggctgcgcttgaggacggctcgcagacgccggctgatgcgctggaagcactcgcggggtgtataggcggggtcctctgcaggagtgggggaacaaggggcagtcttggggtgctcgtcctggccctgcccacctgccagaccacgcccacccagggaagaccacgcccatctgtgccttggcctctcctgcccaccaaaccacaccttcaacgatactgtggccccatccagccagcagaccctacccccacgaggccctgaccccaacccatccagctgaccctaccctcacctgtatgttcaccccagctagacatgaggccccacccactccaggcccacacaagccagctagccccacccctacccactgccatccagatcctgcccccacatgctggccacatccactccatgtcccgccccatccatatcctacctaccccatcctggccccacacaccccattgccctgtccccatccataccctggcctcacccacacactaggtccaacccactccaggtcccgcccacaccccatccatatcctgccccccatcgcggccccacccaccccaggcctcgcccccatcccccatccatacctgggcccaacatactaggtccaacccactccaggtcccgcccacaccccatccatatcctgcccccccatcccggccccacccaccccaggccacgcccccatccataccctggccccacccatacccgccccagccaggcccgcacctctcctccggtcctccccacggccagggcccctcctccgcgccttgctcctgccctcatcctccaggtagcgaagaacccgctcctgctcctccccggagcggttcatgaaatcgttccagacctggaagagaggcagggaggcaggcttgccatgaaacactggggctgcgctgacatccccgggcaaatgggcacggtaaggccgccaagcacgtggacgcgctcctgcggtcacctctgtccactgaggggccgctgcttgtgtcgggccctgagctgagcgcagggaagcggggaaccggggtgggcccagctgtctcggggtgggggggattgaggtgaaacactcctgcaatcgttggagggttcccaaacgtgttgggcaggtgaatccaggagctcgaaggttccaggggtggggtggggattctggcctggtctggggaccccgaaggagactgaggggccttcattaggagatcagaagtgggcgggtgcttctggcgggggacgggcacaggcgatggcctggccgtaggagaactgccggggtccccgtgtggagggagtgagggggttgggggccacacctccacataggtggcgttgttgcaggcctcggcaaagatgcctggtgatgcagggggtgccaagtccccatcctccaggccaggcaggcccccgtctgtctccagcagggtcaggaggtactgggctaggtggaaacagatgctctctgggccggggtggcatttggggacccccaggcaccatggggacccaagaactagccttcctccttttttatcatctcaacctccgcacctccatgctccaactgtcttccccagaaggtacagagaccacctagaccccaggttctggattgtcgaactcctatatatcctttaaagccccagctccaatgcccggggcgccctcccacccagccctgatccaagagtccagggggcgcctgtgtctggctctatttatatggtcccccggcctacagctgacacctctttgggtccccagccccacccaggcacagctcatgggaggggtaacagataacaccaatatgcatgccattctacaaggcccaggagcccccaggaggcgcctcccgacccctgctcactgttctccaggcgctggaggctcttccgccccttggccttgggcacgaggtctgagttccgcactgcctggttgatgaagtgctgtttccgcctggaagccgagagtctcttcacctgggagctggctagggcaggcaggcagctgggaaggggcctgtgggccggggcaggggtggtcctcagggtcaaggccggccaggatctccgagaagggccctaccacagccatggcccgcttggtttcccccagcaatggagagctcacccctacggtgtgtgaagtcctgggcccttaaaatcctattttgtttcatcctcacatcacaggaagcagatacaattgtgaagacgggctgggtgtggtggctcatgccggtgatcccagcattgtgggaggctgaggccggtggatcacttgagctcaggggttcaagaccagcctgagcaacatagcaagactatgaaaaaaaaaaaagacttatttttttgtctctacaaaaaaaaataataattaaaaaattaaccggtgtgctggtacatgcctgtagtcccagctactcaggggcctgaggcaggaggatcacttaagtccaggaggtcgaggttggcatgatggcaccactgcactccagcctgggcaacagagcaagactgtgtccaaaaaaaataaaaaaaattaggtcaggcacattgattcatgcctgtaatcccagcacgttgggaggccaaggtgggtggatcacttgaggtcaggggttgaagaccagcctggccaacagggtgaaaccctgtctctaccaaaaaaaatacaaaaattaatcaggcgtggtggcgtgcgcctgtaatctcagcttactcaggaggctgaagtgagagaatcgcttgaacccgggaggcagatgctccagtgagctgagattgtgccaccgcactccagcctgggcgacggagtgagaccttgtctcaaaaaaaaacaaaaaactgtgatgatagattagtaaaccgaggctcagagaagtgaagacacttgcccaaagtcacacagcaggtgaatgaccaagaaaagctgccgcccacccccaaccccagtgttcaaggtgttagctgtaagccagcaaggcccacagcctttgggacgtgaacagcttccttcagaaatggagagtcaagaaacttgattttatccacatcccccactcccagcagcagaggagccagaaaacagccccagaagctcaaggtgatgcctcagccccccccgcaaaccccccccttaatgtcccctgtccccagggccaggaggagagtgcggctgcagcggcccccctccagagctaatcggcctggccggagcaaatggcattaattgtggagatggattagctgtcacagctgggcctcccaccgagaatccaagggccgagccactcagtgtggggggaataggcagccgcctgggaagcgggtggttggacagggtgggggtaagcgcgcaccgcagccaccgggcacccgggaagcgggcggcgtttggggggaggtaggcgcgcaccgcagccacccggcacctgggaagcgggccggtgagggggggcctcatggatggggacttttctggcaaggaaaaaccacacaaactgggcgtgggagctcatgtaatcccagcactttgggagcccaaggtgggtggatcccttgagcctggggagtttgaggctgcggtgagctgtgactgcaataccgcgcgctccagcctggacaacaagagcaagaccgtgtctcaaaacaaacaggacgggcgcggtggctcacgcctgtcatcccagcactttgggaggccgaggcgggcggatcatgaggtcaggagattgagaccatcccggctaacacggtgaaaccccgtctccactaaaaatacaaaaaaattagccgggcgtggtggtgggcacctgtaatcccagctactcgggaggctgaggcaggagaatggtgtgaaccggggaggcagagcttgcagtgagccgagatcgtgccactgcgctccagcctggacgacagagcgagactctgtctcaaaagccaaacaaacaaaaaaccgtaatgctagctccactgggctcacaaacccccacaccacagggctgaccatggcctccagggtctgggggtaccaggatcggctccacccttatctcctaactccaccccacctgaaacacattctgctccaaccccacagtggcacctcctggccgctgctgcttccaagacacgatttcccgtcccgcctcggaccttcgcacaggcggctcgggtttgctggctggctgtaacccccaccgccggcactcacagccaagcctcgttcacaggagacgctcagaaaaataaccaccaaatcaatcctcaataaaaattctgtgattccaagagagcccacagtcgaaaatccctaatagcatccagagttcccaacacaaaaattaaaagcaacccactccacccctgcaacccccaaaagactggaaaacgctaggaaactctaggccagttgagacaagattcactcgaggcaagctgggcgcggtggctcatgcctgtaatcccagagctttgggaaggtgaggaggaaggacagcttgaggccaggagttcaagatcagcctgggcaacatcacggtccccgctgctcaggaggctgaggagggaggatcacttgagcccagaaggtggaggctgcagtgagatgagatcgtaccactgcactccagcctgggtgacagaccaagactctgtcttaaaaaagaaaaaaaaaatgcagtcaagggggtcagaaatgagggcaatgctctccagggtccacacacatgtaaagagtcctcaagccttaagtctgtgcactttacagaccagctgttacatctcaatcaaaagtaaacaagctgattggccgggcgtggtggctcacacctgtgttcccagcactttgggaggcca[135 bp omitted]gaggcaggagaattgcttgaacctgggaagcagaggttgcagtgagccaagattgtgccactgcactccagcctggtgaacagagcgagacttggcctcaaaaaaaaaaagtacgctgggcgcagtggcttatgcctgtaatcccaacactttgggaagctgaggatctcctgaggtcgggagttcgagaccatcctgaccaacatggagacacccccatgtttagtctctactaaaaatacaaaaattagccaggcatggtgacgcatgcctgtaatcccagctatttgagaggctgaggcaggagaattgcttgaacccaggagacggaggttgcggtgagccaagatcatgccgttgcactccagcctgggcaacaagagtgaaactctgtctcaaaaaaaaaaaaaaaaacaaaacaaaacaattagccaggcatggtggcatgcacctgtaatcctagctactcgggaggc[137 bp omitted]ccagggctgcctgaagcaggaaggggacgggcagataaacagcacagtctccacagactgcggcaaaaatctatgaaaagtcatcagaacaaaaatctcacatatgcacaagcacccaccaatagggacctgcaggcagaggcacgggtcaagcttccaccctggaccaggtgctcagaactcaatggcccaggcaagcctggcaactccgaaactgcctcctcgccaggctgcggcgttagcagggcaggtcctggaatctcagcccagggtgtgaaccccagctacgaagcttcaccctgaaaccccctttttttttttgagacagagtctcactctgtcacccaggctggagcgcagtggtgcgatctccgctcactgcaacctctgcctcccaggttcaagtgattctcctgcctcagcctccggagtagctgggtatacaggcg[267 bp omitted]tggatctcctgacctcgtgatccgctcaccttggcctcccaaagtgctgggattacgggcatgagccaccgcgcccggctcaccctgcaacctttaacctcagccccctctcaaaaagtgggaacaagttggtttgggaggggtactcagagccaaaagggcctgggatgaattcccctcatctcagctgccacttgcttgttttcctcctatgatggggaactcacccctcagccatgccacactgcttttgatcgtaagtgtcgctggactgagtattttccccacattgggctcatttcctgtcacctgtgctgtccccggggaggcaagttctattactttgatgcccattatacagatttggggtttttttgttttgttttgttttgttttgagatggagtctcactctgttgcccaggctgcagtgcagttgtgccatctctgctcactgcaacctccacctccctggctcaaccgagtctcctgcctcagcctcccgagtagctgggattataggcgcccaccaccacgcctggttaatttttgtattttcagtagagacggggtttcaccatgttggcaggctggtcttgaactcctgaccttaagtgatccgcctgcctcagcctcccaaagtgctgggattacaggcatgagctaccacgcccggccctcattatacagatttgtaaaccaaggcacaaagtcaccgcccaagctcccattgctgcaaagagggcagctggagaaggaggtggtggaccatgccctcagcacagagcacagcagccgacgggtactcagtgggaatacagggtcatgttaagccagcgtctctgaagctggatcagcctgaagctgcctccctgaggccggagcactctgtcccatgccccagattcacccacagccccccctgaggccccggggcctacttctccaccccagcagctggacagggccgataacagaagtgacatccgaggggagccctcggggaagtcagagggggcggggctcggtgacacagctcaagccctcccagcaaggggcctggtatcaccccatattacagatgaaggatctgaggcttggagaggtggggctgtcccccgtcaccacccagacaatgcaaggagctggatgtgaacctgggtctgacccagaaccccagagctaccctgcttccctcaccacccctcataccaaagccccacaggcctctcctccaggcccacaaggacctgcctggtccttcccctgctccagcacagcccatggctccccagcatcccagggccaggcctggctcccccttggcctagcactgcaacacgagggctttcgcctgttttgtttggtatctgagggctcgccaccctcccctgggtctctagtgctgagctgagcactggaaatcgagtcccaccatcagatggagctggctgacttcaaccagtttccagcaggaaattaagaaacatcttcaagcttgtcatcccagcactttgggaggccgaggcgggcggatcatgaggtcaagagatggagaccatcctggccaacatggtaaaaccctgtctctacaaaaatacaaaaattagccaggagtggtggcgcacgcctgtagtcccagctacttgggaggctgaggcaggagaatcgcttggacctgggaagtggaggttgcagtgagctgagatcgcaccactgcactccagcctgagtgacacagcaagactctgtctcccaaaaaaacaaaaacaaaaacaaaaacaaaaaaacatctggcctctggggtagacaggggggcctgggagtcaccgacactcctctccagaaatggaaggaacaggaagaccacatcaaaatccccatgcctggccgggcgcagtggttcacacttctaatcccagcactttgggaggctgaggcaggtggatcacttgaggccaagagttcgagaccagcctggccaacatggtgaaactcccgtctctactaaaaatacaaaaaaattatctgggcatagtggtgggcgcctgtggtcccagctactcaggaggctgaggcaggagaatcacttgaacctgggagatgaagtctgcagtgagccgagatcacaacactgcactccaggctgggtgacagaatgagactgtctcaaaaaaaataaaaataaaataaaaaataaaaaaatcccacgtccagccacaggcccctcctcacagtgctccaaactcagggagccccggtctctgcctgatgcacctgctcattccagcctcagctctgtgttcaccacccccaggaacggccccgccccccacctagcccagtcagccttaccaggaagctctggaaaccaaccggccccagccggcccgtttacttctttgctccttaatcactagctcactaggcccacagaacaagacagggtccgccccccgcccaccgccgccccccggtcctggcctgtgaccggcccacagcggcgctcactgcctgtttgttgaatgaagaactaaacttctgttgacacacctcccaagggctggttcatctgtttcccacgccactcaacaagaccactttacagacgaggaaactgaggacccagcgggggtatctgaggcttcctggaccctgaaggctcgaggatgtgtgtccacagaagaggggggcagcccaagctggggagctgctggagtttgggggaacaggcctcccggccactcccaattctactccttgcagattttgagaggggaactgtgaaccctcagtccctcgagcaaaaacacacctttcccagcactggtccctcccccaggaacccactagagacagcaagagaggaaccgacttgtgcatcaggaagccagggctcagggcggaggtgactcagcctggggtggggcagactgcggcggcccccagcagtccccaaccccccaccaggacacagctggcaggtaaacacccagagactgacggctgagagcggaaacatgagtgtatttacatagttacataggagtcactacacctgggcttcaagaccagggtgccaggcgtggtggttcacgcctgcaatcccagcactttgggaggccgaggcaggtggatcacctgaggtcaggagtttgagaccagcctgaccaacatagtgaaaccccgtctctactaaaattacaaaaattagccaggcgtggtggcacatgcctgtaatcccagctactcaggaggctgaggcaggagaatcgcttgaacctgggaggcaaaggttaccatgagctgagatcgcgccactgcactccagcctgggtgacagagcaagaacctgtccccccaacccccaccaaaaacaaaaaaaacagaagactcaggaagaagagcccattttgagggtaaatgcccacaccaggtggttcaaggcccccttagaggagacgttacgtgggtgcagtggctcacgcctgtaatcccagcactttgtgagcccaaggcaggtggattccttgagtcgaggagttcgagaccagcctaggcaacatagtaagaccctcgtctctacaacaaattaaaaaattagccaggccgggcgcagtggctcatgcctgtaatcccagcactttgggaggccaaggccggtggatcacctgaggttgggagttcgagaccagcctgaccaatatggagaaactccgtttctactaaaaatacaaaattagctgggtgcggtggcacatgcctgtaatcccagctactcaggaggctgagggaggagaatcgcttgaacctgggaggcagaggttgcagtgagccgagatcgcactactgtactccagcctgggcaacaagagcgaaaccatctcaaaaaaaaaaaaatagccggcatggtggtgcacacctgtggtcctagctactcgggaggctggggcaggaggatcgcctgagcccgcaggtggaggatgcagtgagctgtgatcaaacctgggtgatagagtgagaccctgtattaataatactactactaggccgggcgtggtagctcacgcctgtaatcccaacactttgggaggccgaggaggcaggatggcttgagcccagaagtttgagaccagcttggacaagttagcaagaccctgtctctaatatgaaaaacaaaaacaaaaacaaaaaaaaagcatcctctgctccagcctggccaatagaccgagactctgtctccaatcaattaaccaatcaaccaatcaaagacgcatcctttctccttcagatacaaatcacctcggtagagatgggtatggcctctgagtggagataatagtgatgatataataaaca[140 bp omitted]ggcaaaacccccgtctctactaaaaatacaaaaaaattagccgggcgcggtggcgggcacctgtagtcccagctactcgggaggctgaggcaggagaatggcgtgaacccaggaggcggagcttgcagtgagccgagatcgccccactgcactccagcctggacgacagagtgagactctgtc[148 bp omitted]aaccccatctctactaaaaatacaacaattagctgaacgtggtggcgggcgcctgtaatcccaggtactggggaggctgccgcaggagaatcgcttgaacccaggaggtggaggttgcagtgaatgaagatcgtgccactgcactccagcctgggcgatagagcgagactccgtctcaaaatattaatactactaaaataaccaataaaacattaacgataattagtaatgagacaacggacactcctgtttgctgggcccgccgcagtgccagctcggtaacccccaccactcggagaagaggccacacttactatcccattttacagaaggggaaactgaggcatggaagcatgaaataacctgcccaggtggcgccgtccgcacacggaggaggcaggaacggaacacgcgccgcctcctcgccctccaccaacacggaccccaggggcgcaccctgggtccccgggtccctgtgcgggccggggtgacacacggctgacccccgcacagaccgccccgcttccgggtcccccgggaaggacgcgcgggctcctgcttgccaggttttaacccacaagggttgtagggatttacccaaaggagagcaaggagccgggtctgcccggaaaggcagggggcgcggacaagcccagagggcgagtggggccgggcgtgcggcagggaccaggctggagcgcatggccacgtgggtgaaccccgacccgcggacaggggcccaggaccctctggcgggaggctccatggctggcacctcggggcccggggagtgggggggcagacccgggagtgggggcgcggccccggggaggtgggggggggggtggaccagggagttggggggcggactggggaggtggggggacggacccgggagtgtggggggcggaccagggagttgggggactgaccggggagtggggggacagacccgggagtgggggcgcggccccggggaggtggggggggtggaccagggagttggggggcggactggggagtggggggacagacccgggagtcggggcgtgggccagggcagtgggggggtcggacagaggagttggggggcgggcccgggagtgggggcgcggacccgggagtgggggcgaagaccagagagtaggggcacggaccagggagttggggggtggaaccgaggagttggggggctgacccgaggagttgcggggcggacccaggaatgggggcaagaaccaggggagtgggggggtggagcagggagtggggggacggacccaggagtgggggcgtggatcagggcagtgggggggcgcggacccgggagtggggggagtcggacccgggaagtgggggcgcggaccggagagtgggggcacggaccgaggagttggggggcggacccggagagtgagggggtggacccgggaatggaggcgcggaccagtgcagtgggggggcggaccggggagtggggcgcggaccggggattagggggcggaccggggagtagggggcggaacaggtaaatggggacgtggatccgggtcccctcccccagcgagcccccggagcgccaggagggtgtccccgctgagtaacaatgaagaccccccacccagcctgggggtccacagcgggcgagaagggaaggcaggacaggctgaagccccggaagatgagcaacgggagcgaggggaacgaagggaacgaggggagggaagggaaaggaggggaggggaggcggggagaggatctcaggggagggagcccagcccgcccccggcgcccgccgcgccccgcccgcccgcgctcacagcagccgccgcccgcccggggtgccctccgccgcctccgggccgcactcggggttctccagcgcgaccatggctcgcacgctgtcgccgccgccgccgcccggcagggccttcaccgggccgggcaggaagtgacgggcgcccggaggcgggcaggggcggggcctggggctgcgcggcggggcgggggcgcccacctcccggctgccgggaacgaacgcggaaacccaggcgcgcggggaggggatccagcccctggggggacgaacggggaaaccgaggcgcgcggggcggggatccagccaacagggaacgaacggggaaaccgaggcaggcggggccgggatccagccatcagggaacgaacggggaaaccgaggcaggcggggccgggatccagcccctggggggacgaacggggagactgaggcgggaggcggggccggccacgatccctacacccagaaatctagctccgggaaggagggacacctaggcgaggggtcgaaaactcaaccacaaccctgcgtcccgatccgggctgcggactgagccaggaatccagcccagggaggcgaggagacacggacagggaaactaaggcctgagcatcgacgagggaggggacgttcttcttggaggcagaggatggcggaaattaaaactgcccgagccttccttccacctgcccctcccagccctggagcctcggctaggcaaccccttcccc[134 bp omitted]caacatgat[131 bp omitted]aaaccccctctctactaaaaatacaaaaaattagccgggcgtggtggcgggggcctgtagtcccagctactcgggaggctgaggcaggagaatggcgtgaacccgggaggcggagcttgcagtgagccgagatcgtgccactgcactccagtctgggcgaggagcgagactccatctcaaaaaaataaaataaaataaaataaagcaagagggaggctgggcacggtggctcgcacctgtaataccagcactttgagaggccaaggccagtggatcacttgaggtcaggagtttgagaccagcctggccaacatggcaaaaccctatctctactaaaactacaaaaattagccgggcgtggtggtatgcacccatagtcccagctacatgggaggctgaggcacaagaatcgcttgaacatgggaggcaaaa[135 bp omitted]gaggcgggtggatcatgaggtcaggagattgtgaccatcctggctaacacggtgaaaccccatctctaccaaaaatacaaaaaattagccgggcatggtggcaggcgcctgtagttcctgctactcaggaggctgaggcaggagaatggagtgaacccaggaggcagagcttgcagtgagccgagattgtgccattgcactccagcctgggcgacagagcgagatgctgtctcaaaaaaaaaaagcaagaaagaaagaaaaagaaagaaagagtaaggaggaaaaagaaaaggatgagaaactgtggatggactcaaaaaagcgtgcactgtgagattcctgtagataaatgtgcaaagaggtgaaaaaggacaatggagagatgtatcaggagtgactggcaggggagctgggcatcgggaatgagtggtttccccatccatcaggcacagggtaagggtagatgctcaaagaatggacctgaacatttattcgtgagagagggaggcaactccagagaacttcctgggccttcctcccattctgggttccagggcttcccttcaggggcctgggcctgtcctgtctgtaccttcttcttcttcttcttcttcttttttttttttgagagagtctcgctctgtcacccagcctacagtgatgcaatctcaggtcattgcaacctccacctcctgggctcaagtgattctcctgcctcagcctcccaagtagctgggattacaggcaccctccaccaagcccgggtaatttctgtatttttagtagagaccaggtttcaccacgttggccaggctggtctggaactcctgacctcaagtgatccacctgcctcggcctcccaatgtgctgggattacaggcatgagccactgtgcccggcctattcattttttttcctcccttttttgtctttttttatgcaaatggaagcacctttttcttcgctgtgtattactccatgatgaccaaatgtcttggactctgttgcaggatggactttgggggaacctcctggatgtcatcctggggtacacttccagctgtgggattatggagtcaaggttgtgctgaccaggctgggtggctcatgcttgtcatcccagcactttgggaggctgaggcaggaggactgcttgagctcaggagttcaagacaagcctgggcaacctagtgagatcttgtctctacaaaaaaatttaaggggggaggggggagggatagccttaggagatatacctaatgctaaatgacgagttaatgggtgcagcacaccagcatggcacatgtatacatatgtaactaacctgcacattgtgcacatgtaccctaaaacttaaagtataataataataaaataaaataataaataaaattaaaaaaaaaactttatttgcaaaaaaataaaaaataaaaaatttaaaaataaattagctggaccgggagcagtggctcacgcctgtaatcccagcacgttgggaggccgaggagggtggatcacctgaggtcaggagttcgagaccagcctggccaacgtggtgaaacctggtctctactaaaaatacaaaaattacccgggcatggtggcaggcacctgtaatcccagctactcgggaggctgaggcaggagaattgcttgaacccgggaggcggaggttgctttgagccgagatcatgccactgcactccagcctaggcaacagagcgacaccctgtctcaataatgataataaaaggccgggcgcggtggctgacgcctctaatccaccactttgggaggccgaggagggtggatcacgaggtcaggagatcaagaccatcctggctaacacggtgaaaccctgactctactaaaagtacaaaaaattagccgggcgaggtggcgggcgcctgtagtcccagctactagggaggctgaggcaggagaatggcgtgaaccagggaggcggagcttgcagtgagccgagatggagccactgcactccagcctgggcgacctgagcgaaactctgtctcaaaaaaataaataaatacataaatcagtaataataataataataatgaggctgtggcgtttgcaaggtgccctccacctggttcccgctgctagtgtccctgcgggtatcagacaccccttgtcagtcatgtgggacacattcagtcccaaaccaccagatcggggacgtccctcacctgccctgaactttccatggctctccagggtcctggggacaaacccaagctatcctcactcagggtctccgctgagggctggcctccccgccaggctgggcccaccccctggagccccagcccctacgagggtcaaagcccttcccatattcacaggccttagagttcgcgccttggctgggctcctagtccgggctgagcgtctactcgctggttaaggtcggtccttccaggtccacagcggcctccacgcggcccaccccctgcctgctccgccccctccagccccctcccgcgctctcactccgaccttgcaccgggaggagggaataggggggttgccgctgggtgaatagagggcgcgtgggcaggggagggagtggcgagcggctgccggagaggcgggaaggcaaggccaggggaggggggcacgggctataaacgctcggccgcagcggcgccggcagaggagccgccgagcccagcacagctgccctctggaccctgcggaccccagccgagccccttcctgagttccacaggcgcagcccccgggcggtcgggcggaggggtccccggggcggtgccagggcgcaatcctggagggcggccgggaggaggaggtgcgcgcggccatgcacaccgtggctacgtccggacccaacgcgtcctggggggcaccggccaacgcctccggctgcccgggctgtggcgccaacgcctcggacggcccagtcccttcgccgcgggccgtggacgcctggctcgtgccgctcttcttcgcggcgctgatgctgctgggcctggtggggaactcgctggtcatctacgtcatctgccgccacaagccgatgcggaccgtgaccaacttctacatcggtgagtgcgggcgctgcgccgcacctgctgccgtcccgggggctccgagggccgagcggcctggggcgccctctcgcgacgcatcggggccctctcggacccggctctgtcccctgcaggggtcccccccaacctcgaatcttttccctgtggtccctgcacctgaggctagaggtcgcaaactccagcgcgggcgggcccgggcgggccggagggtggggagtgtggcacatggaaacctcgacctggccactcgcggggctcgccccggtgcagcgcgggccaacggctcggtgtcagctgaacaaagggctgggggaggggctggcttggcccgcgggccttagtttgcgacccctgccccggtggctctctgagcctgtttatgcatttgtgtcctggggtcccctatcacacacagctgtgagcccagtcggtggctgctgggccggcaccattgtctccagtttgcagttgtggaaactgaggctcagagggtcaggggcctgcttaggctcccccagcccggacagggcccagcagaaccgatttctgccggaatggccaggaaatccgagccggaggcgtaatgtttgagatgtaagggggaattactagaaggcgccccaacttctccgcccgaggaggccaggggcgctgggggaggggggggcctccctgagccatcctgctggtcactcggaccaaggtgggggccaggggtcagggccaggagcgctgggcggttcccgcggccagtggcgcccacgcccagcgcccgcgcatccccaccgcagccaacctggcggccacggacgtgaccttcctcctgtgctgcgtccccttcacggccctgctgtacccgctgcccggctgggtgctgggcgacttcatgtgcaagttcgtcaactacatccagcaggtgcgctccggagcaggaggggagagggcgcacttggggacgggcgggggtgcgctccgcagtgggaggggaggggacgcacttggggacaggcgggagtgcgctccgcagtgggaggggaggggatcgtacgtggggacggggagggggggtgcgctgcggagcaggaggggagggagcgcacgtggggacggagggagatgcactcagaagctggaggggagggggcgcatggtggggcggggcaggggtgcactctggagcaggaggggaggaggcgcacgtggggacgaggagaggggatgagctccggagcggggggcgggcgcatgtggggagggggagcccacgtgggaagggaggacggaccttgggcggggcgcgaggcaacgcataggagaaccaggggctggggtgcccagcttgcgggaaggggctgggcggtggtgcagcctagaactggagtggggggcgggaatgggggagggatgcagacggggacccgggtcactggtgaggaagggctactgaggccctgaggcttcttgccccgcctgtccctccatcccacgcagcccccctgtctcagactcggggtatcagccgccccccaagggctccctcacttccccaatcctcctgccctcctctcccagtctccccaccttctgtcccctcaacccgcactggacactcctcccaggacacttcccgtgtatgtgcctgagtgttcgcacacgtagggggatcagcagggcgggcggacagggcaggctcccaaccgcgcaggtggccacacgcccggctggcggctcccgcaggtctcggtgcaggccacgtgtgccactctgaccgccatgagtgtggaccgctggtacgtgacggtgttcccgttgcgcgccctgcaccgccgcacgccccgcctggcgctggctgtcagcctcagcatctgggtaggtgagtacagctcaggggcctcacgggagaaggcggacacgtcctagtgccctgggcgcccggagccacctgccgcctcggtccagcatctggaaaatgggcgcaatagctctgcctgcctagggccagcgaggctgcagacggggcgcccgggcctttgcagggtggctgggtgaacgcctcccggggaggcacgtgggggaccgctggttccccgagcggggtcttcatcctggcttgtggcacaggctctgcggcggtgtctgcgccggtgctcgccctgcaccgcctgtcacccgggccgcgcgcctactgcagtgaggccttccccagccgcgccctggagcgcgccttcgcactgtacaacctgctggcgctgtacctgctgccgctgctcgccacctgcgcctgctatgcggccatgctgcgccacctgggccgggtcgccgtgcgccccgcgcccgccgatagcgccctgcaggtgcgcggcgtgggtgggaggacagcaaggctgggcgggcggggaggcaccgtggtgggaggcgccggtgggggcatctgcgcgggcagggacagcccaaggggtccaggaggggcggtgcgaggggatgagctgagccgggccccagcctttcgtctaaccaccttcacggcacccccccaggggcaggtgctggcagagcgcgcaggcgccgtgcgggccaaggtctcgcggctggtggcggccgtggtcctgctcttcgccgcctgctggggccccatccagctgttcctggtgctgcaggcgctgggccccgcgggctcctggcacccacgcagctacgccgcctacgcgcttaagacctgggctcactgcatgtcctacagcaactccgcgctgaacccgctgctctacgccttcctgggctcgcacttccgacaggccttccgccgcgtctgcccctgcgcgccgcgccgcccccgccgcccccgccggcccggaccctcggaccccgcagccccacacgcggagctgctccgcctggggtcccacccggcccccgccagggcgcagaagccagggagcagtgggctggccgcgcgcgggctgtgcgtcctgggggaggacaacgcccctctctgagcggacccggtgggaatccgagcggctccctcgggagcggggactgctggaacagcggctattcttctgttattagtatttttcttactgtccaagatcaactgtggaaatattttggtctcttgtgacgttcggtgcagtttcgttgtgaagtttgctattgatattgaaattatgacttctgtgtttcctgaaattaaacatgtgtcaacacaggactttctggatcattccagaaagtgtcagacgttttctcattgtcttgtagttgactgtcactgtgtacgattcattccacttttttttttttttttttttttgagacagtgtctcattctgtcacccagactggagtgcagtgacgcgatctccgctgactgcaacctctgcctcccgggttcaagtgattctcctgcctcagcctcccgagtagctgggattacaggcgcccgccaccacgcccggctaatttttgtattttaatagagacggggtttctccatgttggccaggctggtctcgattttcctgaccttaagtgatccccatgcctctgtctcccaaagtgctgggattacgggcgtgagccaccgcgcccggggcctcatcccacttttagagagactaaaatgtgaaaacagacagtgcaaatgcccatcaatcaacgagcagataaagaaaatgtggcgcgcgcgcacacacacacacacacacacacacacacagagaagactactactcagccataaagagtaatgaaatggcattcacacaacctggccggagttggagaccactactctaagaaactggaatgggaaaccaaacatcctatgttctcagcctcctgcctcagccttccgagtagctgggactacaggcgcccgccat[137 bp omitted]cattttcaggtgagacggcgccacctagcggccgccggcgctggccccgcccctaagagcccgccccccctcccctcccgccggccgcagtcccgcaggtgcccggcagatggcacgcgcggcccgcggaggtttcgcgccttcttttctcgcctccagaagtcccagaggtgccccgtgcccagggcgcggtgtcgctccttcggatcccaacctggacccccggttggaggtatccccgctgtgaagtggggcaatcagaggcacattgtgaattatcccggtcttaggcactttacttttgagggccccttctatgaaaacgttattcaaaatggtaatttattctacaatattcaccgtcaaagaaaaaaagaagaaaaagatactttattctgcttcatgtcctggaagaggggtaaaaatgatattttatatctgcgtcagtataaagagagatataacaggctggattcattatatatgattttttttttttttttttttgagatggagttttgttcttgttgtccaggctggagtgcagtggcgcgatcttggctcactgcaacctccgcttcccaggttcaagggattctcctgcctcagcctcccaagtagctaggactacaagcctatgccaccacaccaggctaatttttgtatttttactagagacaggatttcgccatgttggccaggctgatctcaaactcccagcctcacgtgatctgctgacctccacctcccgaggtgctgggattacagacgtgagccactgtattttattttttgagacagtcttgctctgtggcccagactagagtgcagtggtgtgatcatggctcactgcagcctcgacctcctgggctcaagcaatcctcttgcctcggcctcccgagtagctgggactacaggtgtgtgccaccacaattggctaatttttgtattttttgtagagatggggtcttgttacgttgcccaggctagtctcaaactccggggctcaagagatcctcctttctcagcttcccaaagtgctaggattacagtcttgagccacggtggtcagccttaatttttttattttataaattttttgtggagacagggtctatgcccaggctcatcttgaatacctagccttaggccatcctcccgcctaagc[133 bp omitted]cctccgcctcccaggttcaagctattctcctgcctcagcctcccgagtagctgggattacagatgcctgccaccatgtccggctaattgttttgtatttttaatagaggcggggtttcaccatgttggccaggctggtttcgaactcctgacctcaagtgatccacctgccttggcctcccaaagtgctgggattacaggtgtgagccaccaggcccagccctagtttgggctttttaacctgcagagctgtgggagcgggatctggggggttttatgaggatgtcccctacctgagtgcagagtagagaaccggtccagtgaccagcagggttgggggaggatcacgctgtttttgtgtgggggaggttcccaaagccccaggcgcccccaggagatggtctggctgggaaaccttcagagctagggctgctgtgcccccaggagatggtctggctgggaaaccttcagagctggggctgctgtgcccccggtagatggtctggttaggaaatgtttaaagctggggctgctgtgcccaatgcacagcttgagaaagagactgggagaggtctgtactgatctaaatccacactgctgcctacccctgcggggcatgagggcatctggaatatggtggagccagctagtctgcgtagacattcccggctccctctctgggctaaaaataggagccccctcactgcaggcagctgccatcctgcatcccctcacccccctgcgcggcccctttgggggaagctgcagccagctacccggatcacagcttcctcctgggaaacgggtaggggctctacccttcctgccctgggggtaattatgcccccaccctgtgcccttccctttgaacaaagggcagcctaatccagaacaggatggtgaaagggttgaattaacattggcccattttatagagggataaactgaggcacagacaggcccatgcacctgccctccaggtgcctttcgggtctgctggcctccaggtgctccatcgtaggtgggagggacttcctgcaccttcagacctgagctgggtcctggcccgagaagggggtactcccacacccctttatcccgctgcagggagcgtctctccaaagcacccccaacctggggcaggtgtctcaggcctctccatcggagataggggtggcagctgggtttggtgtttaatatagccttatggtggaggcctctcagacacctgccgccattaggttacacgtggccctggggctggaaggctggattcaggccttgttgtcgggggcagctctcctgccggcagttttttgttttgttttgtttttgaggtggagtctcactgtgtcacccaggctggagtgcagtggcgcgatctcggctcactgcgacttccacctcccggattcaagcgattctcctacctcagcctcccaagtagctgggactacaggcgcgcgccaccatgcccggctgatttctgtatttttagtacagatggggtttcaccttgttggccaggctggtctcgaactcctgacctctgatgatccgcccacctccgcctcccaaggtgttaagatgacaggcgtgagccaccgcgccggccccggttgcagttttgtggagggaggaggtgcaactaggtggaaggacagagagaaagttgcaatgccgtgtgctagtctagggaaaggggagggagacgactacaaccccgcccccaacactcaggaccggggacccgagcccgccagagaccctccacaagtgagggtcccccggggtggcccctgcccgccctccaggctcccctggggctcacgtccgggctggagcctgggcctctgcgcttagccccctggggtcgcttcccgcgcacacagctccctgcagagcacgcgtccccctcccgaccgccttccttgcaccccgctcggtgcctcagtttcctgctctgcgcagtggcgacaagaaggttgccaactacagagaggagtgagggctggagacgtgcagggacctccctggagggaggcgcggggcacgtggttgggcaagcgaccgctcagaccgtgtaagtcatcaccaccttcacgggggggtggtgggcagccgagctcccgacgctggtgacagccgggccgggcagggtcgtcctggtttcacaaaggggctccgggtcccagcgcgcacctccccacgcccgcgccgagcccccgtctgcagcccgtccctccccagagggaggccggcgggaccctggttccctccctccgacgccgcccgcccagctctgcaccgggtctttcaagcccatttctcagacttggaaacggcggctccggagagtgaagtcactctctcagggtctctccgtctaaggggcgaaggtgaaactccgagtccacgaggcccagcgtaggtgctccgtaagaagggaagagacttggtcccggatctggctccgatgcctccggccagcccgcccaggcggagccccagtcagtcccctcttcttcccccggggcgctcccgccccagcccctgcccccggcaccctctgcgcttggggccgcgtcgcgcactttgcccaccgtccctaggccgggggcggggcctcccgcggcgctgttccccttcccgtttattatttattatcctttaaaggggccgcgacctgaaaatttccgtccactctgcccggctccccagcgcccccgggctggttgcgcgtcgtcagaccgcgggaggggggcgagggggcgtgcggggaaaagtggggagccctggcgaggccctcccgcgcccgggccgcggcgctgaatcaccggccaggtatttgcatccgagagcgactcgtcccctggtgatttgtctgggggtgggggaggggcggggcgggggccggccgcgcgcggggcgcctcttaccaatcgggcggaggggtgtagacgcggacgcggctggcggctcggtgagtcggcgcgcggcacagccccgtgggtcgggggccgggagccagcggcgcgcaccggcggctggaagccaggcgggcccgggcaggccgaccccaggcgcggggcgcgcgccccactacgagccgccctgcgcggtaaggctggggagcgcgctggccgttcccagcgcgggttccggtgccggggtgggcgcagtgcgtcctggaagccaaagaagggggtccccaaagttgggcggagatgttggtgggggtcccggactgggaaggcggccctggcgggctggggttcggggagttttctctgcaccccgcttggagacttcactccccactggatcaatcgctcaggggcgagcaggggcgatcgggggtcgcgagtgcgcgcccccccctccccagcggaaggaaatggtctctgcgcgcgcgcggggggctgcaccccgatattttatttcatttttattctttctccccgaaatcagggatttattcgggagcccagagaggagggagggtagttcccggcgagcctccccagccgggctggtttatttataaagtgtccgccccagcgcagagaggggcccccgggggagacaccgcggcccccgggcgccggggtgggttgggcccgggcgcccggttcctcggcggggatacccaggaagagccccctgacccgtttcagggccccccagacacaaaagcgggcgcaggaagcgctgggagcgcgcgtttgtcaactccaacgctcggcgccggccccgggcggcgggttcaattatcttccgtttttaggcgctcgggctggaggggttcccccccccatgcaaatcggccgctttccaagaagcctttgaaatccggaccagggtttctgtcttcttatttcttctccttcttgagtttttttctcacttcctccaggcccccccaacccaggactttcttagccccctccccagctttctgccccgcccctccccctcctcttcccttcgtggagtgaggggcccctttcgccacccgcgggcccggggccttgcacaactctttaaataaccatgttttgcaaggcccgcgccgagcgggtgacctctctccggaggcctggggggaggagggtgtggcccaggatccctccgccccccacccctgcctggtccaacgaccacccagcgccccgtcccagcctctcccttggggctgtcataaaatgggggtgggggtcgaggacaaagggctcttggggggaggggtctgaagggggtgggcgtagctagtttagggttatggcggcgatgggggggcacccagccctgacctaggggggaatctgggatccccacctgccccctccaccggccccaacgtggaggtctgtcctgctcccctcccccacccggcgacccggaagggtcattaaacccagcagggctcggagcgggctggtggggggagtggcttcctttggcctcttccttctgtgcccccaaagagggggggctttgcttggagctcttccgtggggggggccttgtcttgaagttgtcccaggtgggggaggggcgacagacccgaccagaccctgagtcagaaatgccccctcagcactttcttgggttgggtgggtggggggtgacctccagcctggggatggggggctgggtgccgccctggtggcctccggaccgccaggctctcctggtcacaacccagcgctatggccctgaggtctttgtgacctgggacctctgtccccacaacagatggaacagaggctattttggaacatgccctcctcgctttctcccaggggccacccacctgccccccactgccttttcacccatggggccgaaagactcaggggtctgggtaaagggtgtctagggcagaggggccacaggactctcttgtccggtgactggggaggcttgggggtgtctgctgtgcaacactgacctgggtggggtcgggtcacaggagggatctgagtcccaggggtccctgcctcctcgtctctccaggccttgtctgcccaggagctgtgtatgagtcttgggggctcctttgccagggtaagggttgggggtggcctcctgggcccagctgcctctcgggagggtggagctttgccccctccgctgtccccatgatgtgccttccctctggggtgtcactccaggcctgttgggttctgcccggcctgttttattggcggcctgggcgggtggaggtgtggcctgggctagggggtggctcgggtgggacccaggccccaggagtctctgttcttcacccaggccattaggactggccctgggtggaaggcactctaggctgggtgagtgtgttgccgtccgagacatctggcccactcgggatcccagaggaccgggaaactccagacccctgttgccctgcagagattgtggggtctgcgtgggaggctctgtggtcacccagacctgggttcaaatcccaccgccatgtctccaagcagaggatccctgagcctcagttgtcctcaaccatgaaatgggaccgccctggtgcccccttctctgacacctgttggtgcccaccttaacctcctgaactcgattcatccctccttgagtgccatgggttgggggggtactgttacccacactgttttgcaggtagggaacctgaggtccagagaagttgtggcttgggcgttgctgttgagttgtgtgatggggggagggttagcccagggcccgtatacaacaggcgctcaatctccagtctggcctgagatgggaggatacctagatacctggaggccaggctgggccgctccaacagggactcaggcagcgactggaacttagaacccacctgactggggcccggagcccgctggccaatcacaggccaggaacgcccattcccccaccctgcttgtgaagcaataatccaagatctcctggggcagacagtctggccacagcgtgtttctctgtggccccgtgcggggcgaccttgctacccaggcccacagtaggctgtatgcgaagagcctgcgcctctgcctccaagaaggcctccaggtctgcatcctgcatgagatggacatgagagctgatccccagggccttcatggggaaggaaggagggggcttgaggagctcaggcctgctctgactgtgccttttttccccctcaggtttctgcaaatgcgtgaatgagccggatgccagcctctgtcccctggagcccagcgtgaggaagaggcatgccccatcagccttcagcttgagcccggcggcccccgcccccgccccctgccaccctgcactgccccggctcccccgcggcccccacgctgcagtgcggccgggccccctccccgcaggggccgcccccgccgcccacccctagcgcccgtggtggtggtggtggtggtggtggtggtggcccgggccgcagggccatgaaactacaggccgtgatggagacgctgttgcagcggcagcagcgggcgcgccaggagctggaggcccggcagcagctgccccccgatccccctgctgcaccccccggccgggcccgggctgcccccgacgaggacagagagcccgagagtgcccggatgcagcgggctcagatggccgcactggcagccatgcgggctgcagctgcgggcctgggacacccagccagccccggcggctctgaggatgggcccccaggctcggaggaggaggacgcggcccgggaggggacaccgggctcacccgggcgaggcagagaagggccaggagaggagcactttgaggacatggcctccgacgaggacatgtgagttggggtctggggcagggccttctgggggctgttactggctctgagtgtcactctgctcatctgcagaatgggagtaagggtcaggtcgcgggatctccttcctgtaattccagcagtttgagaggccgacgtgggaggatcacgtgggcccaggggttggagaccagcctgggcaacatagcaagaccccatctccgcaaaaaattaaaaaattagccaggcatggtggtgcacctgtggtcccagctactggggaggctgaggcaggaggatcccttgagaacagaagttgagttgtgattgtgccactgcactccagcctggatgacagagatagacccagtctcaaaagaaaaatggtttttttagccgggtgctgtggcttacgcccgtaatcccagcactttgggaggtcgaggtgggtggatcacctgaggtcaggagctcaagaccagcccggccaacatggcgaaaccccatctctactaaaaatacaaaaattagccaggcgtggtggcagaagcctgtaaacccagctactcgggaggctgaggcaggagaatggcttgaacctgggaggtgaagattgcagtgagccaagaatgtgggttttttttttttttttagacagagtcttgctcttttcgcccaggctggagtgcagtggcgtgatctcagctcactgcaacctcctcctcccgggttcacaccattctcctgcctca[221 bp omitted]ccgatggctacagcagattcagcggcaggggcagataaaatctgcagccggctggacctgcatagcgtgtgggtccccccagggctggctgagggctcacttgctgtgggatcctggcctccag[141 bp omitted]tgaggccccatttctacaaaaagtacaaaaattagtcgggtgttgtggcatgcatctgtggtcccagctactcgagaggccgaggcggaaggactgcttgagctcaggaggtcaagactgcactgagctgtgatcacaccactgcactccagcctgggcaacagagaagaccctgtctcaaaaaacaaaactggccgggtgcagtggctcatgcctgtaatcccagctactcaggaggctgaggaggagaatcgcttgaacctgggaggcagaggttgcagtgagccgagatcgtgcctttgcactccagcctgggcaacaaagtgagactgtgtctcaaaaaaaaaaaaaaaacaaccaaacaaaacctagcagca[183 bp omitted]gtggtggcgggcgcctgtagtcccagctacttgggaggctgaggcaggagaatggcatgaacccgggaggcggagcttgcagtgagccgagattgcgccgttgcactccagcctggacgacagagcgagactccctctcaaaaaaaagacaaaaaaaaaaaaacggctgccaagaaagtctaggagggtgccgtggaggggcagtggcgagggtggggcggatttcagatggcggtgggagaattctccctgtggagggaaggggaggtggagctgggacagcatgcatggtgcaggatgcaggaaccagcctgccgtaatgattccctttttttttttcccaagagagtcttgctctgtggcccaggctggagtgcagtggtgccatcatagctcactacagcctccatctcctgggctcaagggatcctcccgccttggcctcccagagtgctgccgggattataggtgtgcgccaccgtggctgcctgcgtgatgcttttcaaggccccaaaattcacgctgtagggacggcttgtgctgttctgggctaattggaaacaaagtgggcgtcacgggtgccccacgctgtgctcatgagcgctctctgcagtctgagctggcggcggccggctcttcctatttccagagagggaaactgaggctgggcggggagtgggtctttccttgggctgggacgagccagcaccttctcccctgactcctgccctctgctcaccccaggaagcccaaatgggaggaggaggagatggaggaagacctcggggaggatgaggaggaggaggaggaggattacgaggatgaggaggaggaggaggacgaggaggggctgggccccccaggccctgccagcttgggcaccacggcactgttcccccgaaaggcccagccaccccaggccttccgcggcgatggcgttcccagggtgctggggggccaggagcggccggggcctggccctgcccaccccggaggggccgcccacgtagccccgcagctgcagccgcctgaccacggcgactggacttacgaggagcagtttaagcaggtgagtgggcgcgtcccgcgtggcggctgaggcacctgctcctgggccagtggggccctttgaaggcccacgttgcacggggtgtgtgctgagccgggcgtcgagttgagagctgggggttcctgcggtagctgtgcttcctgtgcttccctcctgggcgtgggctcgaccagctggctgttcattgctctgatgtgggatgtgtgaggagcacccggccgggtaggagaaacctggggggctccacggcccccatatcggaggtgatggggcagagatggaaaggtgggcctgggagggagaggctggcgccggcccgagctgggcttgggttggaggaaccaggcctgcgggcgatgcgggcagagaggccggggccttggtgacgtggtgacttggcctcctctgtcccctggcatctgtggagagccgtggggggttgcgggctgcagctggcagccgaggggatgtgggggtggctcaggtgtggctgcaggagacgcaggagccagggcctgtgaggctccgagtgggcggttaaggctggggccggcagggggtctcagggaccccaggctgaaggaggaagtaggggccgccccagcctttccccgcaggcggccaggccagaggaagtggccgggcgggggatgctttgaagttgggccgtgctgggccgggcagatggaaaccagatggtggccaggctcacattccagccctcgtccagctgggctctgcctcgacctctgggcgcggctggggggagccacctcctcgcccggggctggagctggtctgggctcccgcagggaggtggatgatggacacgctgggacatgcctgcctcggggcagccccttcggccctgggcttccagaatccgctctgaggagcctcctaggaggggccaaggcacagacacccaggggggcctccccggggctcctgactccaggggtgccgggtagcttaaggggcggccctaaccccagcagccctcaagagacttaaggttgggctgcctggaaactcacaaatagtaaagagctgaaagccggacacggtgtgggagaatggccagggcagcggcggggactcggtggggggggggggcgtctcgctgattccaccctgctctgtgactcagtttcccactcctgcagaaggggatgctccacgggccacactgccgcgcgtcccattctgccagtgagaaaacagaggctcagtgttgggaggaggggtcttgtgatcttttctgggtttaagatgatacggatgagcatgctgagagtggattctctttaatttcattaatttaattcaccaattaatttaacattcacccaatattcgccatctgcccgggactcagcccgcagggagccctgggctggaggggcgggcaggagccggacggagacctccatccccgcagggttatagccaagccgagagggagggtcaaggccccccattcagtcggtccttcgggggtcagaggtgaatgggaccccctgaccctggacacacgccccgcccagacagccccggcctccaaggcccaaagccgatgggggagttttggggtgactggcccagaccaggcagggatgaggggccaggcgccctgaccccacagcccgcagcatgtcctgagcgaaggcaggaggcagaagccactgtctaccttgtctgggcgacaccgcgggtcagggttgtaggtgccatgtggggtttttctgcagcgggaagccgagatggggaaactgaggccagtgcagggaggggggtcactgtgtcaccggcagcctcaggtattcctggagatcctgccgccccgcacctgccccctgggtgtaccgggcagtgcagaggccctgaggtggactaaagctcggcttgtgtgtagggaccgggtgccgcctctgggtcttgcgggagacgggattggaactccgagaagatgagggcctagggatggtcgtgggcagcgggggtggggggaggcccccgccctgcagtcctgtgacttttttttctctagagaagggctttcacggtgttgcccaggttggtctcaaactcctgggctcaagtgatctgcctcactcagcttcccaaagtgctgggattacaggcctgagccacggtgcccagccagtcctgggatcttatcctgggctgttcgtggcaggtccagccgccgatgccgccgcccgcccagctggccagacacctgtgttcccagtgtcaacagtggcctgggcccaaccagcccagtcagtgttacctcccgcccggcccctactggggcccctgttgactctggcgcctgccccacccccttcctggcacgtggcaggcctggcccgctggccggccgcttggcaccgtctctgcctcttcctcccaggtcctggcagggctcggggctaacttccgcctgcaaatcctcgacagctgtgaaattctgctgtcggctgcaggtctggtgggtggccaggccgcggcggggggccgggcgcagcaggctcagggccacgggttctttccttggacacctggaaccttgctgcctggggcctggggacgtgcagttttggaggccagcacgtgtcgggcagtgattaggatctcagcctcctgatgtctgacgtagcctcctggtggcctcctgtcacccacacagcaggcccagcttctagaaagcggccacggtaggattttattggattattattatttttgaggcagggtcttactctgtcgggtaggctggagtgtagtggtgctgtcctaactcactgcagcctcgatctcctgggttcaagcgatccttctgcctcagcctcctgagtagctgcgagtacagacgggcgccaccaaactcagctaatttttgtagagacggggtcttgctat[143 bp omitted]ggagtctcgctctgtcgcccaggctggagtacagtggcgcgatcgcggctcactgcaagctctacctcccgggttcacgccattctcctgcctcagcctcccgagtagctgggactacaggcatccgccaccgcgcccggctaattttttgtatttttagtagagacaaggtttcaccgtgttagccaggatggtctcgatctcctgaccttgtgatccgcctgcctcggcctcccaaagcgctgggattaaaggcgtgagccaccgcgcccggcccgtgatgggattttacacgcacaggcggttaatcacagatcttcagctgcttaaggatttgaacctttagtctcaacaattctaataagtgttgaatgaatttgagatgaatcttaaaaaacagctttattgggctatacttcatatgccatacaattcactgttttaattgtacgattggggccaggcacagtggctcacacctgtgatcccggcactgtgggaggccgagatgggcagatagcctgagcccaggagttctacaccagcctgggcggtatagcaagaccccatctctacaaaaattagctgagtgtggtggcgcacacctgtagtcccagctacttgggaccctgaggtgggaggatcccttgagcccaggaggacaaggctgcagtgagccgtgatcgcgccaccacactccagcttggtgacagagcgagaccctgtctcgaaaaaataagaaggatagggtggg[138 bp omitted]gcagcacgcgcctgtagtcccagctacttgggaggctgaggcaggggaatcacttgaactcagaagcagaggttacagtgagccgagatcatgccactgcactccagcctgtgtggcagagagagattctgtctctaaataaataaaataaaataaaccctgaccctttaactattatccccctattctaccagcacgccccagcccctggcaaccacacatcccctcctgcctctgtggattggcctgttctggacattttatagaaatgggatcacatagctgggtgcagtgcttcacgcctgtaatccctgtactttgggaggctgaggtgggcagagcacctgaggtcaggagtttgagaccagcctggccaacacagcaaaaccctgtctttactaaaaatacaaaaattagctgggtgtggtggcgggcacctataatcccagcactcgggaggttgagacagaaccgcttgaacccgggaggcggagattgccgtgagccgagatcgcgccactgcactccagcctgggcaacagagggagactccatctcagaaaaacaagaacaaagaaaagaaatgggatcacacactgcgtggccttttgtgtctggcgtatctcactgagcgtgacgtcctccaggtgcatcagcaccgtggcctgggtcggagtctccttccttttcacggctgagtcatactccgctggatggatgtgccgtattgtgtttgcccgttccgctgttggtgaccactcgacctgtttctgccttttgggtttgtagtgctgtacacgtttttatgtgggcgtacgtttgtattacttttgggtgtgtatctgggagaattgctgggtctgctggtgactccatattcacccatcagaggaactgctagactgtttagcaagcagctgcccacgttaccttcccaccagcca[137 bp omitted]acctccacctcccgggttcacgccattctcctgcctcagcctcccgagtagctgggactacaggcacctgccaccacgcccagctaatttttttgtattttttagtagagatggggtttcaccgtgttagccaggatggtctcgatctcttgacctcgtgatccgcccgcctc[134 bp omitted]tcagcgtcccagagtgctgggatcacagacgtgagccaccgcgcccggcctgttgtcgacttttgatcctagcctccttgtgggggtggcgtggtttctcactgtggttctgattttcattcagtgtcaggatctctccctctgctttccaaagtaaagcttgctgcccatgtaacttgcagatgagctcagaggtgtaggaatgacggcactagccggtatctgttgcttcactgcgtgaagaaagtgactgagtgttttagatgggtcgtctcccagatcctcactggatcccaaggagctgccgttgaacctgttgtgcagacgagaaactgaggcatggggtgatcacatgacttgtgcacagtcgcccgggggacgtgtcagagctggaatttgacccccgggatgcacctgccagagaggacccagcggtgtgtggatggatggcccagggagctgctggtgggacggttttggggaagctcagctgcccctccgtttttctttttgtctggaatgaaagtggttagaccaggccagacctcagtgctgtcctcatatccaggcctccgggcctgacagctgggcgtgtgtgggcactggggcagggacggccaccagcagcctctcaggctcaaggccagacacacctcgctgggcccagccccagagaccgctgggtcctcaccacggtgcctgccaggcagctctcgggagtgaagcgagaccccagcaagaaacgggcatccggtttttggtctttttttggtcttttcagctcatttgttttttttaattgtggaaaatacacatagatacattattttatctctcttttttttttttttttttgagacggagtcttgttttgtcacccaggctgcagtgcaatggtgcaatctcagctcactgcaacctctgcttactgggttcaagtcattctcctgcctcagcctcccaaatagctgtgactacaggcgcgtgccaccacacctggcctatttatttatttatttatttatttatttattattattattttagacggagtcttgctctgtcaccagcctggaatgcagtggcgccatctcggctcactgcaacctccgcctctcgggttcaagcaattctcctgcctc[134 bp omitted]gcctcccagagtgctgggatgacaggcctgagccaccgcgcccggcctctcgatacacttttggttccagaagtaacacttgacactcttcttgcagagaggaagaaaatggaacgtttacagggagccccgagtccctcccttgacctctagggcatgagccgcatgttctccaggcctttctctgcccactcacacccaggaatgtgacctgggaggtatctaacgtgtgatcttccgggcaggtcgggaggttcctcccgccgctgccttcgaggagctgtttatcttgggtgcgttcgcgtcgtaattgggatgttccgagccacctggttcttttcagctgtatggacgttcccctcgtggcgctggacacccccacgtccacacacttccctcggtcatttccctgttgtaagcaatactgtaacgaacatcttcggggcgtgagagttgcttggagcagtgtggggaggaggtggggagctggaattgccagggctctgggagaatcggcaacacgttttcttcgtcgtgccccggagacccccagactggtgggagacagagctggatgtgaaggtagcactggggtctgccgtggcctcgccacgtccatttcagactgaggcttaggggcgctgctgggcttccccacatccctcgaggggtcagggctgggctagaggggattgagggggaggctgccaagaggaaggggcattggggctggggctttgcaggatgtgtaagagtttgttagcgagccacagcagggcagggcctgcctctgggatcactgtgactggagcgtaatgtgtggggccagggtggccaactttttggcttccctgggctacattggaagaagaagaattgtcttggaccacatgtaaaatacagtaacactaatgatacctgatgagccaaaaaaaattgcaaaaaaactctcatcgtgcgctaagaaatgtacgcgtttgcactgggccgcatttacagccgtcctgggccgcgggtcagtcaagctctcggtgtagcaggaggggtgggcagagcttgagggcacttggcagggtttggagctgggagaaggaggctgggaggacccttctggagcctgttttggagacagaacggaggcacccttggtccaggcaggagtagaagaggccaacactgcagctgggcttctggggcctgagaagaaggagaaggaggagaattttcccagcacaggcgggtgctctaggcagatggtgcagctggggcctttgcccagaggtcaggcagcaggttccgagcacacagaggcagcggctgtgtttgagacagagtgtgtttgtcaagagagccccgagccaggccctcggccgccagccctggtgccggcgtcttcctgggcctccgggagccccggctgcacgtgagccgccgggagggctgtcgggaagccccctgggcacctggtcctccccaccggggcagcgcccgcctcatcaaagccactgtggctgctggcgccgggccagctgggccctggcgggcgaggggtgggtgggtgcccgccagcccctggcactgtgccccggcccgtgcccgtgccaggagcgtcgctgactcagccggaagagccttatctggcccctgcgccaccgcctggccgtcgggtcaccgccgcggggtcaccgccgccgcggcctggccccacgcccaccgccggcgtcccaccctggtggctgctgccaagcgccggccccgccccatgctttctaataacacacgcggcagcccgagggagcggtgcccgcaggcagagagtgtccccgcgtggtgcctgggcgggggaatgggcgtggtgagccgccgtggcgtgcgtgcgagtgtgcacgctggggctgtggccgggcggctcgtgggtcctgtctcgtgggaccctgcctgggagggaatcttgctccagacacagcatcttcggaccctccaaggcctctgcccaccgggcacctgctggattctgtgggtctcgtgtgtggggctgtgtgcacccagccagcggcacctcacgcgcccgcctgcgtgtccccagccagcaccacggtgttcgtttaggtctctgtgtgccgagtgacgtggcaaacttcccacgtccctgttttgcgtggacctgttggtgagtgtgtccagacgtgtgtctgccctgacgtcctttgtgaatgtctatgttggggtgatgatctcctgtgtgtgcatttttttaactataaagatggggtcttgccatcatgttgcccagcctggtctcaaactcctgggctcaagtgatcctcccgcctcggtctctgaaagtgctgggattacaggcgtgagctgctgtgccggactggtctcttgtgttttgtgtggatgtggctgtgtgtgtgtgtgtgtgtgtgtgtgtgtcaggggtggctgcaagcgtatgtgtgtgtgcacgtcgaggctggagagtgtgtgtccaaaagcgtgcctgcttgggctcgccacgtgtgcgcacgtgtgcccgtgacagacgaccttcctgtgtgcctgagcatttgggagcctcgtgctggaccctgaagcatgaggtcgcggtggggcctattaaccattagacccccggggctgctagagagtggcgctgtctgtcttggtcagcagcgcgcgtcggccgcggggcacagatcagcgcctcccctgcccgccatgggctctggagccagcctagccgatgatggagccccagtggccaccgagctatggacagggccgctgggggtgcacccccaccctctccgaccccgaggagctgccggcagagccctgtccactcttgcctcagtttccctgctggacacaaagggctgaagtccaggtcccttcgatggcccaaattacctgactgtcgatcctgactggggcggtggcgacatggcccccgcagctgcccggcggtggcacccaggggcgtcacccacgagggacgcttgactcaaggtcctctccactggccgccgggagccgggccgggagccgctgcggtgccgacctggtgggtggcacacggggggcgggtgcggaccgcctcttctccgctctgccggctgcacatggccagaggacaattgggggtcacagggttaaacgctgactaatctggccattgaaggcccaagcgccgggatatgcagccttgccccttggtcagggctgggctgggggtccgtgggcacaggtgggtgggcagggagtaggtggaggccgcccctcccactgccccgcaggccctggttctggccaggctcaggaagtgagctccctggggacccaggccccatgtccagaagccacgctggacatagtgcccagattccatgcccagcagcctcctctgccaccctcagagacggagaacgtgagagcaagtaagaacccgccttccgggaggagccccgtctggattggatggcatcgcccaaaactcacgtccacccagaacctcaagatgggactgcatttggaaatagggtctctgaagatgttagtttcagtgaggtcctgcagcgtacggtggccccaaatcccatgccggtcggttgtcctctaagggggaggtcacacctgtgatccccgcgctttggaaggccaagacgggagtttcgcttgagcccaggagcttgagaccagcctcagcaacagagtgagacccctgtctctacacaaattagctgggtgtggtggtgcgtgcctgtggtcccagctactctggaggctaaggcaggaggattgcttgagcccaggaagtcgaggctgtagtgagctatagtggcacgactgcactccagactgggcgacagggcaggaccctg[212 bp omitted]gaggcaggagaattgtttgaacccagga[132 bp omitted]tggagacagaggcagaggctggagcgatgtggccacaagccaaggacacctggagcccccagaagctgggagaggagggaaggaccctcccctggagccccagtgacacgctgatgtcagacttgtggagagaagaaacctctgctgacgtggcaccgtgccctgggcaaggttagggcagaaacaccaggctgtgcctccctgggcacacatgtgtctgagcccgaccctttcatgggcacttacggagcacctgctgtatgccagcccgaccctctcatgggcacttacggggcacctgctgtatgccagcccgaccctctcatgggcacttacggggcacctgctgtatgccagcccgaccctctcatgggcacttatggggcacctgttgtatgccagcctgaccctctcatgggcacttacggggcatctgtatgccagcccgaccctctcatgggcacctacagggtacctgctgtatgccagcctgaccctctcatgggcacttacggggcacctgctgtatgccagcctgcctgcgtactggggacacagccgtgcatgaagcagaagctcctgccgccggcactggagtcctgacgtcggcagcgcggtggagggcgggcctgtctcgccgttatctcccaggcgtgtctgctccccgtgtgtctggctgcaggggcgcgtccagggggtgtgtgtgtgtgtgtgtgtgtgtctgcgtgggagtgtctggctgtgtggctgcacggaggcctgtctgggtaggagtgtcggtgggggcggtcccacacggccatggtttgtgtctgccacggcctcagccccgttgcttcggtcgatgcccccaaaccttgacccatctcaggggcaccacgctcactgctacaaatgtgggtcttccgggcaagtgagcgtcccccacccaggacccccgaccccggccctgggagggcccgactgccagcctggctgaacctccttcattgtctggttttcgggggtggattttgagacagggtctcgtgctgtcacccaggctggagtgccgcggtgcagtcatagctcactgcagcctcgacctcccgggctccggtgatcttcccgtgtcagcctcctgagtagctgggaccacagacactcgccaccacacccggctaacttcattttattttttggagacagggtcttgctgcgttgcccaggctgaactcctgagctcttaggggagccgggatgtccctgggtcctgcggtcgctctctgtctccatctcttctttctcctctcccctctccctgtctctgccacccgccccgtcccttccaccacgtcgccctgtaattcttccctgacggccatttttccgggagtggctgggcgtctctgccctagctggcgccctgcccagccactgcccccacccctcagttggccacatgcccatctcgtgggggcccttggacctggttcttggggaagaactagacagatcacctctgtggttattcattgctttaatgccacctggggggagagagcctgggcacaccaacatgcagagatcccagctctgcccgacctgggcctggtgcctgtgacctcctcctctcggcctcagtttccccgcccgtaagacggggatggtatcagaaggagtgcagctcttgtgactttgttttcatccttggcctttacggttcaccaggtttctcctgtaactcctgtagagaggggacggcgtgtggcatggcccctgctgcctgacccagcccacctccgtctgctccctagcggggaggtgtccagggcggccccagcccacctccgtctgctccctgcagcgggtgggatggtggggtgtccctggagcgggcagagccttgagtgactcctccgaggctgctgcccatggtaggggcagttcctgtcctgccctcagcctggggtctggcagaagctccggccaggtgtaccccaagggaccccggaccctgagcccaccagggagggcccttcctcttgactctagggtgggaggtggaagcagccccttccttcctgcagccgtctttgggcccggactccaggcaggcccgtgtcccattgtggggacggcgtcgacatggccggggcaggcgtgttctggccccttgcactgcccggctcctgctgctggtgctgggctgcgtttctgttcagagaacctgggctgggagtgatgggaccgcagtctcccaccaggtgcctctttccaaatggacactcctgctgggcatgacacttctgaggctttctgggaccgtccaggtcccgtctgcagggaaccccaggacggagttaattgctgagtgcccagctctgggcaaagtgcttggaccctgcggttactccgagcccatttctcagcagggaaaaatgaggctcgcggaggcaggggcccggcgtccaggtgggagcatgagggcgtattgtgggtgggctggccggtctggggggcggggaccctgtacagaacgccccggccgcgtggagtggcaggttcgtcactgcctgggggaggagaacactgggtatttcatttttatttttttgttttttttacttttactttttcctttttatttatttatttatgtatttatttatgagacagagtcttgctttgtcacccaggctggagtgcagtggtgcgatcttggctcactgcaagctccgcctcccgggttcaagcgattctcctgccttagcctcccgagtagctgggattacaagcgtgcaccaccacgcccggctaattttttgaatctttttttttttttttttttttgagacggagtctcactgtctcccaggctagagtgcggtgtcgcggtcttggctcactgcaagctccgcctcccgggttcacgccattttcctgcctcagcctcccgagtagctgggactacaggcgcccgccaccatgcccggctaatttttgtatttttagtagagatggggtttc[144 bp omitted]ttctgtttgtttgtttgtgtgtgtgtgtgtgtgacagggtctccctctgttgcccaggctggagtgcagtgatgtcatctcggctcactgcagcctcgagctcctgggctcacgtgatcctcctgcctcagccccctgagtagctgggattacaggtgcgccactatgcctggctaatttttttttttttttttgtaaaaacagggttttgtcatattgcccaggcgggtctcaaactcctgggctcgagcagtctgcccacctcggcctcccacagtgctgggatcaaaggtgggagccactgtgcccagcccacactgagattctgcattgaaatgtttgctgggtgccccccattgctgggcaccgtggggtggggtgtgtctgtgtgtggcctggggcaccccctgccgtcagcccagatctgtgtctgtgtctgcatctgtgaaacgggtttcctggcagatagaggggctgcttaaggccagtgccctcggcggagactctattagggactgcgggccccagatttccacgtcatatctcgccgccatggggctgcctcctgcctcctctgcaccaactttctggaagtgcctgtcagctgatcccaccccggccacatctcagcaccaggcctgtcgctgccgtcctggactcgtgggcctcagtttccccaactgtgaaacgggctggcggccggtcagcgtctcctccctgagcaagggactcccccatccatgtctcagcccccacccagatgccccgggaccgtttcacagatgagaagaccgaggtgccagggtggcgatcgcacgaagggcccgtcacgggagaatgaggagggtctggcgtcagcaagctcccccggaatctcgtgatctggaaatccacagagaagcaccttcaccacgccagcttcccgggccgcgcttcattgtcatttctggagagtgttattaatatccgccccgtgggtgcggcgctgtgtatttccagagaggggactcggggcccatcagggccgggggagtggagccggcagatgttcggccctgcccagaatcacttccccaatttccccacgcccggcggggctctcagcatctgcatccgccgaggcctggctgtgctgacgggaattgaaaggacctcgtggcttaggcaggcgggggagccccccggctggtcaggtgcacgaggagcaacccatggccaggcagagcccagagagggcggggaagggcctgaggtcacacagcagacgctagctaagtaagcgcctgctgggtgtgggtgaccctgccctcccccgacccatcagtccaggtcggtcggggccgcctgtcccctggtgtttcccttcacagcccacccgccccagctgacctcttcctcctgctccctgaaccgggaagtccgggccctttttggacactgcatctccccagcatacaagatagtccaggacacacaggaggtgctcaataatggctgcagagtgccctgtcctggcagaaacgctgtggactgacagccccgtgtggctggccctgtggtccacgctcagctctgctgcctctgtcagtcctgggagtttccgggacgggaaaaacagcgagattcaaaatcccccggcctcccggggccgcggtcctgcggggccacagcgccagcttccgcttcttgatggcttcggccccacccccaccatgggtaaactgaggcccggagaatgggcagactggggcgcgagactccaggtcctccaggtcctcctgccccccgtgccctcctcccgcctgcagccccaggctctgctccgtcttcattccttcttcattcctgcctcatctgtccagctgttcatt[131 bp omitted]actgcaacctccgcctcccggattcaagtgattctcctgcctcagcctcccgagtagctgggactacaggcgtgcgccaccacgcccggctaatttttgtattttagtagagacagggttttgccatgttggccgggctggtctcaaactcctgacctcaggtgatccgcccgcctcggcctcccaaagtactgggattatgggattacaggcatgagccaccgcgcgtggccatcctggagtctacagcagtgatgtggctgcgggggtgcactctggccgcctccttcccgcctctccggactgtggacaagtgaagggctttgcaggttgctggtactctgcaaacctggttaccagagaggtgtggacccctccctgcctcagttccccaaatgcagagcagggccccaggggtgtggggaggcagtgctgggtcccgccctgcccacccctcccagcggcggcgtgggtgcctgtgtggagggggaggtgccaaggcccccagggaccctgcccacctggggagcagcagccgcaggtgctgagtcatctcagcctctgccccgggcctccgccgtgccagatagcaggatcatcaggcctccgggagggggtggggggctgggggtgctgtcagtggatgggagctgccaggagtggggcttcagagaggggccggaaaggggacaccagcattggaggaaggaaagcttcttacggcctctttcttttccttcttcctccaactcctggcctcaagccatcctcctgcctcggcctcccaaagtgctgggattataggcaggagccgccgcccctggcctttcccctccctccagtggatgcctgctggattcccgccac[136 bp omitted]cacctcagcctcctgagtagctggaattacaggggttcaccaccacgcccggctaatttttgtatttttagtagagacggggtttctccatgttggccaggctgggactcctgacctcaggtgatctgcccacctcggcctcccaaagtgctgggatgacaggtgtgagtcaccgcatctgggctagattttgccttgatgggtgggaggtaggcaggaaagatgcaaagaggccgtccccagagtgaacggatggatgaggccgtccccagagtgaacggatggatgaggccgtccccagagtgaacggatggatgaggccgtccccagagtgaacggatggatgaggccgtccccagagtgaacggatggatgaggccgtccccagagtgaacggatggatgaggccgtccccagagggaacggatggatgaggccgtccccagagggaacggatggatgaggccgtccccagagggaacggatggatgaggccgtccccagagggaacggatggatgaggccgtccccagagggaacggatggatgaggccgtccccagagggaacggatggatgaggccgtccccagagggaatggatggatgaggccgtccccagagtgaatggatgagcacccagcctgagcccgggaaggtgctgagggttagcacaggccgcctgctgctgcaggagtgagaggggcccactcagggaaagaggggttcagggggagcagccaggtgtgtacagatggctgtagccatgtggaggcgcgcgtggggaccggcaggcaggcagggagttgggctttcttctgggagcagtagggagccacggttgaccgtggagcaggggagagacctggtttgatcttggtcttgacttccaagccccttggtccctccgaccttggaggctgctggaaggagagggcatctcatttaccatcctggctgcttcatggggatttgggagataaaaagcagctctttcagtttaactttggttgtaggagtcacagtgaattagttctttattttgttttttttttgaggtggagtttcactcttgtttcccaggctggagtgcaatggcacgatctcagctcaccacaacctctgcctcccgggttcaaactattctcctgcctcagcctcttgagtagctggggttacgggcatgcaccaccacgcctggcctattttgtatttttgatagagatggggtttctccatgttggtcaggctggtctcaaactcctgacctcaggtgatccgcccgcctcagcctccctaagtgctgggattacaggcgtgagccactatgcccggccaggattctttcttaaagaagagacggggtctcgctgtgttgctgaggctgatctcaaactcctgggctcaagtgatccttctgccttggcctcccaacgtgctgggattacaggcgtgagcca[136 bp omitted]accccatctctactaaaaatacaaaaattagccaggagtggtggcaggtgcctgtggtcccacctaatcgggaggctgaggtgggaggatcacttgagcccaggaggctgcagtgagctatgactgcatcactgcactccagcctgggcgacagagtaagaccctgtctcaaaaaaaggaaaaaaaacaacgtagactaaagaaccaaacctcagagttccccggctggtctgggtgggcctggctgttggatgaattctctttttccctctgacccttcagccccgctgggtgcgtgggcgcctgggaggctcaggctgctgcccggagggggcggctgctgactcagatctattgctgctgcttctgagcatccgcagacctatatctggccttagaggaaaacatacttcttcagtttcccagaagccatattggacagtgcaaaaacgtgccttttagaacatttctcaggctgggcacagtggctcatacccagaatcccagcacttcgagaggcagaggcgggaggatggcctgaggtcaggagttcaagaccagcttggccaacatggtgaaaccccgtctctgcaaaaaatttaaaaaaaaaattagccaggtgtggtggcacgtgccggtaatcccacctacttgggaggctggggcaggagaatcgtttgaacccgggaggcggaggttgcagtgagctgaggtcacaccactgtactccagcctgagcgacagagcgagactcggtctcaaaacaaaaacaaagtgtctcaggctgggcgtggtggttcatgcccagaatcccagcactctgggaggccgaggagggaggatcacttgagcccaggagtttgtacccagcctgggcaacatagcaagaccccatctctacaaaaaaaagttaaaactgggcatggtggtgtgtgcctggggtcccaactactccagaggctgaggcaggaggatcacttgagcctgagaggctgaggctgcag[132 bp omitted]aaccctcctggaggctcagtcaggccaaccctcctggaggctcagggctcggcagtccccaaacgctagacacttggattctttcttggatttccctgaattctgtggccaaagagagcgtctgaagggctgcagctgaccaggtgcctcccagctcctgcacccctcccacccctgccgtggcctcatccccaggtggggcctcatggactttggagcctcctgggagactggagggggcctggggggcaaaggttctcccagggggccctgcagacaggcggtttctttacagcctgggcctctgggcccaaggacaccgccctgggccccccgcagctgctgggacctggtgggagtgcccaggtggggcctgcctggggactgagtggggaaaccatagcccccctgtgaccttgggcactgcccacctgtgaccttgggcactgctgggggaggggccgcatgtgctggccccggccaccctcttctgtcctggccaaccctttccttggattttctgcaaacctctggggtctttttctgaccttcctcccacctcccagagccggtgggctggggaggggagtcctgagccggggctgaactccctggttctaggggtggtccgggcagccggggaaccccctccccactcccaggtggccctgggacttatcttgcaccctgtccgccagcagactccactgaccccctcggagctgtcgtttctctgggaggtggggtggagaaaatcatcaacgtttcgccacaaacaagaatttcctgtttgcccttccagggctggggggtggcggttatctcactttttcctcccctcccccaccggcgccaccacccgagccccgccaccctctctcctcacaggtgccccctccagaggggcccggtcctcatcaggtgggggcggcacctcccacccccccaggcctcccacacccccccccgtgcagagccgggggagtgtcagggtcgggggccacagcgtcttccctccatccccagagccacggagtgtgtcttgcagatccgtgtaacggggctcgggcgtgcaaccttctgggaagaaaaccaaagaggaatgaaggggtcagaggctgaggggggctgtggagggggctctgtcagaaggcgacgtttgggcgggaaggcaggagccgagcggggacccgggagctgcattccaggcagaaggaacagcgccgcggaggccctggggtgggggcctgtgcgttttacatagaaagacgccaaggctgggtctgggggctcctgcctgtaatcccagcgctgtgggaggctgaggcaggaggatcacttaaggccaggagtttgagaccagcctgagcaatatagcaagaccttgtctctatagaaatacaaaaattagccgagcgtggtggtgcctgcctgtggtctcattggctcaggagaccgaggtgggaggtggaggctgcagtgagctagggtctcaccactgcactccagcctgagtgacagagcgagaccctgtccctaaatagggcagctcaaggccggggcggagggagcaggagagggcagggaggggccaggagggtgctggggggccctgggaggctgtggccgagggagggtcatgctcagatgtctgtgaaaaaccccccaccccacccaactgctgagtggggaagggtctggcaggaggggcggccgggggacctggaggtggcttggctccacgcgctctgtgcctcggtttccccttctccgaagcaggtggtgctgggaaggggagacgatgggcccagccttggtaattaggggtccacaccttccatcccccacagcaggaagtggacagaggggaggggaccccctcagggaaagacccccaggcctgccctgtggccccgcattttcttggcatcgcactgagaaagcaagttcatttaacatgcatttattaggcaactgctgtgtgcccgattttggatgctggcaacaagataagaattccgcatgttccagggcagacagacgagagacaaatgcgtgaatccacacagctggggccatgcgagggctgggggtccaaggggggccgtgagccagaaaccccgtgaggccggtggtcggtaaaggtgggtgggagcagagcatctgcggaggtgatatcggtcctgggaggacggggggctcccctccagggagggaatgaccacaggggacccagacgaagggaaggggctgagaaggcctcgcagacgggaggaacagccggggcgaaggcggccgctcggggctgatggggggcggtgggggtctcagcggaggggcaccttcagaacttcacacccgacccctcccgtgatcagagcaggccccagggaggtcaggcggcgtggaggggagtgcgggccgcttatctcggccctcagcccctggggagggagtttccggagattttgcccaatctccagcctgggtttagggctcctgtgggtgtgtggtgggcggctgatttcagagctttctggttgacgtttcagaggggcagggtttcggccacagaacccaggtgagaaccaaggcctgggtttgccatggggtgtgctgtggcccagcagttcaacccgggatctggcccacaaggggggcctggacaccgccatgggcagcctggacaccgtcccctgctttcccatccctggggcctcggccagctggccagggcggggcgccccccacaggggagcggaaccgggggccagagacccataaagcccaggcggcctttactgctggctttgttgctggctgcccacagcaacggccattagagccgcctcccccgccagcagctggggcccccgcaggtcctccctttactgccacgcatcagtgccccggccccacaggggtctgaccgtgcctcgccaccggcccagttcgcccaccatttggcctgggagttaatggctcccctctccaaccccaaccttggctggctgtacatggggcagctgattgctgcctggcgcctcggtttccccatccgggatgtgagggtagctggggcgccaggtgcttggggtaaagctgctgtgttttctcacacactctatttgagagatggggaaactgaggcaggaggtgcggtgaggtttcttgtaggggctgtgccagggaagggggggtccaggcagggtagaccccgtaataccgggtcagaatctcagaggagaggaccttccgctcgccctggaagggcccaaggtgtgctggcctctacgtgcggttcttagccggggggctgcgtaacgaaggacctcaaaccgcgggcgtaaaacaaacgaaacctgttctccctccgtcctggagcccagagtccaaaatcgaggcgtccgcagggctgcgctccctccaggggctgcaggaggagccttccgcctctcccagctcctgggggctccaggagtcccttgacatgtggccggcctctgtctctgtgcgaccgtctccagtgcccaccggccttcactgtgactttttctcaatttgatcacgtctgcaaaggccctttttccaaataacgtctcgttctgaggttctgggccgatgtgaatttgggtgggggatggcgttcaccccaggacagccccagcggtgaagtcctccccattccagtacctgctgcctcaggcgtttccctggcaagctcgtcctgtccccctctccgccctgtccccctctccgccctgcccggctcacttttgcagctgagaaaatcaaggttcaagtaacgagcatttattaggcaactgctgtgtgctcggctgattccagactctgggaacaaaacagactaaaccccagatacactcctagatccgtgactcggtgatggacggggtctcggaggaagaacgtggaggggagggggcggcagccgggccggggtcagaggacgaggccgggcgtgtggccatgtgtgcgtgcctgtgctcatgggacccaccggcccggccagccgggtctacctgagggccccacacccctcaggcagctgaaggggaaagggcctccccggccaccataaatcagcgcaggaatgcaggctggccagtctggcgctggccgggttggggcggagacaaagaccaggcagctggacctcgggcagcctcgaccacccagggcagaggtcaggactcctggctgcccccccagccccttcccggaaggcctcactgggcctccaatacacagacggggaaactgaggcccagagaggggcaggacggctgcagggtgatggggcctttggccggcctccccagcacctgggatgtccccgcagcagcaggggctgggcgtgggtctccttctgggccctaatgaccgatcatcccagctgaggcctaattggtggtttcaaggctccccactgcccagccagccacattcccccgagcttaattggcagcctggtatttgtcgcagctcctcctcggcaaattggcccccgcctgaactccgctttctaattatccctgccggctttcccccaccctgcccgcccgaacctgtgggtgggggggggcgctgggggacctcctggctccttgtaccccagacggagcctctttcccctctggaagacgttccggggcctggtgatcttcttcctccccagccaccaccctggcaggcagaggcggtcggtggctcatttcatagctggaggctgagactccaggctccaggtgcggggaagccagcaggagacaggaggaccgggatgggaagcagggcggggctctgggccaagtccccagcagcccccaggctctggtcccgcactcgccgctgtgtctcagtttcctcacctgcaaagcagagccagttctcggaacaaatgcgctcccgtccgaccctcaggacagccccgggaggcatgctggtgaatttttgcagcgatttgctgtgtgaactcaggcaggcactgtcctagggtaaattgtgtcccccaaagaaaaggtggagggcggtggctcccgcctgtgaccccagcactttgagaaggcaacacgtgaggatcgagggagcccaggaggtcgagaccagccagggcaacatagaaagacccatctctacaaaagaaaatgtaaaaacttagccgggtgtgatggcgagtgcctgtggtcccagccacttgggcagctgaggcaggagaatcccttgagcccaggaggttgaggctgcagtgagctatgattgcgccactgcactccaggctgggcaacagagtgagaccctgtctccaaaaacaaacaaaaaaaagactttgggaggctgtggcaggcggatcacttgaggtcaggagttcaagaccagcctcgccaaatagtgaaaccctgtctctacccaaaaaatacaaaaattagctgggcatagtggcaggtgcctgtaatcccagctactcaggaggctgaggggggaga[132 bp omitted]gggcgcagtggctcatgcccataatcccagcactttaggagactgaggcagtcggatcacgaggtcaggagaccatcctggccaaatggtgaaactccgtctctactaaaaatacaaaaaaattagccgggcgtggtggcgggcgcctgtagtcccagctactccaagaggc[144 bp omitted]caggttcaagcactggattcccagtacctgtgacaggacctcatttggaaacgggggaacttactgacatacaatcacgtgttgacactttggtcaacctc[184 bp omitted]gtggcgggcgcctgtagtcccagctactcgggaggctgaggcaggagaatggagtgaacccgggaggcggaggttgcggtgagccgagattgcacccctgcactccagcctggggacagcgagactccgtctcaaaaaaaaaaaaattccatatttcttgtgcaccttttctgtgttcagctgtgttagacgcacagacactcatgctcacgttgccactgcctacgggacccaggacagccacagatttgtagcccaggagcgctggctgggctgtgcctgtgcctgggtgtgtgggaggctccacccgtgaggtgtgtgtgactcactgtttgatgttcacactgacgaaatcaccaacagacatttatcaggacgcatcctgcacgaagacagaggcagaggctggagcgacgcggccacaagcccaggaacctggagcccccagaagccgtgagaggcaggaaggttcctcccttggagacttcggagggaacgcaaccctgcagacatcttttgttttgttttgtttttagagacagggttgcgttctgtcgcccaggctggagtgcagtggtgcggtctcggctcacttcagcctccactgcccaggctcaagcaatcctcccacctcagcctcccgagtagccgggactgtaggcatgagccaccccacctgggtaactttttgttatcataatgtagagatggggtctcactatgttgcccaggctggtcttgaattcccgggctcaagcgattcacccgcctcccaaggtgctgggattacaggtgtgagccgccaccctgaagagaagttggttttggacttctgggctccgggaccgcgggagaatagatttctgttgctttaagctgcaacgtgtggctgtaagggagttaaggatcgatttgagatgaggtggccctaaaaccagcaggctggtgtcctgagaagaggagagagagacggggagacggtcttgtggagacggaggcagagactggagcgctgcggccacaagccaggacgcaccttgatctggggttcccgggcccctggaccgggagaggacactgtcttgtcccaggccacctggtttctggtgcctccttgcagaccctctgggaagctcgttcaccggcatttctgtcttgcagccttgtggttcttcacctgcccagcggggtcttcggctctggcagcggcttgagggtcctaggggtggtgacccctgctcctgtcctcctgacctggcctccagtgcaggagggacatggttcccacacctgagctctggcaccaactaacccatcccctctccaccctcacagctctacgaactcgacggggaccccaagaggaaggaattcctggatgacttgttcagcttcatgcagaagcgaggtgagccctctgcccccaccccgctggagggaggtcacagaaacagggctgtaggaggggccctactggctccaggtatgtcggggcggtggtgagcaccccgtggctggaggcatccaaggctcctaaatcgggagggacttcaggggtgtcttggggggaaacacatcctgccatggaggtttgacgcgggaggcacgcctgtgagtctaaggggtaggtcccttggtggggggcagggcagtctcagggccccaacccagaacagacagtccaggtcatctccttagcatccagggtgcagtgaagtgggggtccccactactgggtaatgggggagtggaaccagcctctgtgtttagggagtggggtcagattcgggctggccaggtgggtgcaggtgcggcaggacagaagccccccgcccggccgcgagatggcttagagtctaatgatctcatggcggccaatgcgacatttgagtcctggcccctcccctcttcccaccagggcctcagtttccccatctgtaaaaacgggccacaaacagtccctgcccaaaactcagtggccagcaggtaccccagatgtgctgagtgcagggccgctgtttactgtgcacacttattgggcaccaacggtataccaggctctgtgcccccaaagtctcctggcctagagagggcaggtctgggctggtgtccaggtggggaaactgaggtccagacacaagacagactcagacgaccaagggtagccggggtgtcccagcggccattcccaggccccaccccagcttagagtgaccacggggcagagagagtgcggcaagggcttccgtctcgcctccaagtcctcgtcggccggagagggtcctaggagcgtctgctgccaggtaggagccgccccaacccccctggacactcctctagggcagggagctagctccgatccccactgttcagacgggggaggaggccttggggcccacagaggtcggaaggggtggggcagagggctctgtccctgcacttggggccgtcacaggggcccgctgtgtcccagcctccgcccacccctcccctggcttctataaacacaggccccagacccgccactgccagccgcccggaagggaaggaggaggagggttgtgggccccctggcccacactgcccagcggcctccgagttaacccctcccgtgctgggaacagaggatccagacccgggacctgggcgggggcccctcctgtgttatcctccaaggccaggcttgaccagggcccactgccccctgtgaggctggacagatcctccccatgaccctttatcatcctgttcgcacctgctcagccctgaccactctgctgtggggctccgagctcctgggtccaaagccaacccgttttgctgttacccgtgcctggtacagtgcctggtg[132 bp omitted]gaaaccccgtctctactaaaagtacaaaaattgaccaggcgtggtggcaggcgcctgtaatcccagctacttgggaggctgaggcaggagaattgcttgaatccaggaggcagaggttgcagtgagccgagattgcagcactgcactctagcctgggtgacagagggagcccccgtctcaaacaaacaaaaagcaggcatggtaggctgctcatgagtgtgggtgagatgggggcccgtggcacgtggggccgtgagggttggtgtccagctttacctccctctccaagctgggaattcctacaggacaggagacagcgagctcctatgcgtccctcaaaacccagcctcaaagctccctcttccttggcttcctccaggagcttcctgctctgtaatgggggcccttggagctgagaatccgtcaggtgaacctgcccatcaccctagacttcacaatcttcctctccttcactccagacagagagaaataattttttttttcccctgtgtcacaaagtaaaaaactctaactaaatttctcagaattctctgggggctagaagtgagggaggggtcctgaccacaccctctcccctcagcagcagcagctggaccacctgacctgctgttccctgacaacctccccacccttccttatctgggccccacgacgggccctggtgatgctcccagctccttctgtaaacatcctcctcccgcccactgcagagccagggcgtggccctgggaaccaaccctctgctgctgatccttttttttttttttttttgagacagagttttgcttttgttgctgaggctggagtgcaatggcggggtctcggctctctgcaacctccacctcccaggttcaagtgattcccctgcctcagcctcctgagtagctgggattacaggcgcccgccaccacgcccggctaatttttgtatttttagtagagacagggtttctccctattggccaggctggtctcgaactcctgaccttgggtgatccgcccgcctcagcctcccaaagtgctggaatgacaggcttgagccaccgcgcccggcctgatgccgttacttttactttgcaaactctgaggcctaaactggtgtcccgagtggggccgggcggaggctctgggcaggtttccgggccgatcctgcagctgaaacccggcgcggctcctctcgcccaggctgtaaagtgggtttcaggtgggatcgggtctgaggcccgtcttcctccaacctgggatctcctccattcactgggggttttgcaacctgggaagggcctggaagtggcggagggtggtgggaggtgtttctggaaggtcagacaccgggggttccgggggtagcaggcctcgaccaggcagagggccggctgctcactcagggctgcacccgctctccagccagtcacatcccagaacctcgatgtccacgtccccatccctaacagggcgatgggcgtcccctcccaccccatggtgagtgggcagcagctatggcctgggccacctgccctcactggtcttcactgagcgcctactgtatgccactgagtgctgggaccccacgtaggcagaacatggggtgggggccacagactgtacacaattgatctcctaagtgcagaatttcacggacagaacgataggtttaagtgggtcttgcctactgtcaggccagggaggggctgggcagaggtggagctgacatctgaagccagaggctcctggtgcaggggcagcctgggagagccctggagggggcaggtagggctggaagggcggggaggggccacgtctgcagccggctccaggagttgaggggcaggaacctgagtcagcccagccgcctcttcttcctgggccagcccacctaccgcccttcccctgcctaggctaatcctccccctttccctccctggcatagcgtagcccacaaccctctcctcctgggctagcccaaccccccatgtcggggctagcccatccccttcccctccctaggccagtccacagccctccattctccagacttgaaattgggtaagccaggctttaccccttgcctgcctgaggctgcagagcccctgtcagtgtggagggaacaggcctctgggaacataggcagagttgttttggcagctgccgtggtgtgtggcgtggagaaggaataacaaagatccgggcgtctcccgcacgtccctcctctcagtaaccctcctcccgagggctgcgctgtccctaagcccaggttactggtggataaaccgaggcagagctgccccctctgcaccctctcgagcagaggttcccagcctggatgatcctgcacccacagagggccctgggcaatgtctggagacatctgtggttgtcacagcctgggcgggggagtgctcctggcatggagagggcggaggccaggacactcggctccctgcagtgcccaggtggcccccaacctccctctcgccccttcccccagggacacctgtgaaccgcatccccatcatggccaaacaggtccttgacctgttcatgctgtacgtgctggtgacggagaagggcggcctcgtggaggtcatcaacaagaagctgtggcgtgagatcaccaagggcctcaacctgcccacgtccatcaccagtgcagccttcaccctgcggacccagtgagtggcggacggttgtgccgaggtcgggccagggcactctgagcagccagtgcaaggggcctgcagaagagggagggggtggtgggcagctgcagaggagggggcagtgggcagccgcaaagggcacagggccacaccgtgcgtccagggcccgagagcgtcaagtaggggtgcgaggaccacacagtctctggggttgtgcaatcaggggccattgcgaggaacagcattgagatggagggaatgggcaaaggcccagcagctctgggggctgctgagcaagtccaagggaagaaccagggatggtggtgccacagtggggtttactttgtactgaaggccaaagagagccgtaggggtgacccgggtgccatcctcttccctcgtcccacccacagatacatgaagtacctgtacccctacgagtgtgagaagcggggcctcagtaaccccaatgagctccaggcagccatagacagcaaccgacgggagggccggcgccagagctttggtggctccctctttgcctactcgccaggcggggcacacggcatgctctcctcacccaagctacccgtgtcctccctgggcctggccgcaagcaccaatggcagctccatcacccccgcccctaagatcaagaaaggtaagggcctgtatggggcctggggcgtgttcccaactgagcttcagcctggctgtctgaccttgggggatacctcttcccctctctgggtaaccaggatgaaaaaccctatagttggcatggaaaagggcttccaatctaccagtcctctgcctatggcagacattaccaatccatcaccattttctaattccacacaggtggcaggcagacattgctaatcaatctgtgtttccagtcctgtggccaaggcagacattactaattgatcactgtttttccagtctacactgaggcaggcatcatcagttgatcagttttccctcccactgagcctctgaatcctccataacacagaggtaccaacagcacacacagcagtgtcacctcagtttgcctgtctgagttaccatttctcatctgggcaacatagtgagaccccatctcaaaaaaaaaaaaaaaaattagctgggcgtggcaacgtgcacctgtggtcccagctacccaggaagctgaggtggtcagatgggttgagcccaggaggtcgaggctgtggtgaactgagattacaccactgcactacagcctgagcaacagtagtgagacccagtctaaaaaaaatttttttaggccaggcacagtggctcacgcctgtagtcccagcactttgggaggctgaggcaggcggatcgcttgaggtcagaagtttgagaccagcctaatcaatatggtgaaaccctgtctctactaaaaatacaaaaattagccgggtgtggtggcacacacctgtagtcccagctacttgggaggctgaggcaggagaatcgcttgaacccaggtggcagaggttgcggtgagccaagatcacgtcactgcattccagcctcagcgacagagtgagactccgtgtcaaaaaaaaaaaaaaaaaaaattagcttagtgtggtggtgggcgcctgtaatcccagctactcaggagactgaggcagaagaatcacctgagcctgagaggcagaggttgcagtgagctgggatcgcgccactgccctccagcct[148 bp omitted]accccgtctctactaaaaatacaaaattagccaggcgtggtggcgggtgcctgtttcccagctactagggaggctaaggcaggagaatcacttgaacccgggaggcagaggttgcggtgagctgagatcgcaccattgcactccagcctgggcaacaagagtgaaactccgtctcaaaaaaaaaaaaaaaaagaaaagaaaagaaaaaagaaggtgcatgttcctgccttgagtggaaggcagggcccagcccctcctggccaccaattccccttttttcctacctagaggaggactcagccatccccatcacagtccctggccgcctgcctgtgtccctggcgggccaccctgtggtggcagcccaggcagcagctgtgcaagcagcagccgcccaagcagctgtggccgcacaggcagctgccctggaacagctgcgggagaagctggagtctgcagagcctccggagaagaagatggccctggtggccgatgagcagcaacggctgatgcaacgtgcactccagcagaacttcctggccatggcggcccagctgcccatgagcattcggatcaacagccaaggtactgccctcgtgcccagacccgctgtgcttcctgcgtgtgtcacacagtgagggccttggagcctacatatgtaaagagtgccaacaaatcaataagaaaaaaaaagccgggtgcagtggctgacatctgtaatcccagcactttgggagaccgaggtgggtggatcacttgaggtcaggagttcgagatcagcctgggcaacatggtgaaactccatctctactaaaaatacaacaaattagccgggcgtggcagcgcacccctgtagtcccagctacttgggaggctgaggcaggagaatcacatgaactgggagatggaggttgcagtgacccgagataacgccactgcactccagcctgggcaacaatagcaaaactccatctcaaaaaataaaaaataataaagtaaactggctgggcaccgtggctcatgcctataatcccagcactttgggaggctgaaatgggaggattgcttgagcccaggaatttgagatcagcctgagcaacacagtgagatgccatctctacaaaagttagctgggcgtggtgacacgctcctgtagccccagctactcgggaggctgagatgggaggatcacttgagcccaggaagtcgaggctgcagtgagccatgattgcaccactgcattccagcctgggtgacagagcaagacctggtctcaaaaacaaggtaaaaaaaaacaaagtggagtatggacaaatacacttattcaacaaataaatattgagcacctactgtgtgcactggtgacagcatgaatgtgacagacaccgtctacaccttgtaaagctaaaatctagttggcgagacagacagaaaacagaacatgtc[216 bp omitted]gaggcaggagaattgcttgaaccctggaggtggaggttgcagtgagccgagatcgcaccactgcactccagcctgggtgacagagtgagactccgtctcaaaaaaaaa[146 bp omitted]aatacaaaaaattagccaggcgtggtggcgggcgcctgtagtcccagctactgggaggctgaggcaggagaatggcgtgaacccaggaggcagagcttgcagtgagctgagatcgcgccactgcactccagcctgggcaacagagcaagactctgtctcaaaaaaaaaaagaaaaaaagaaactaatttgttcttcttcccacagcctccgaaagccgccaggactctgctgtgaacctgacgggcaccaacggcagcaacagcatcagcatgtcggtggagatcaacggcatcatgtacacaggtaggacccctgaggccacgccctgcctggacctcgcctctcccgccgccgtgaactcaggaccctgagttgcgcctggtcccacctgcttgaacctaggtgtgcgggcgagcagggcacggccaggggctttgcaggacaaacagtcaagactgatggagaggataccatcgttcacccggtaccacgctcagcccagagggggtcgtccacagatacatattcagtgtgacgttggatggttcacattcctagttttttgttttaatgagacggagtcttgcacagacatgcaccagcacacctggttaatttttaaattttttgttgctctttaaattttaaattgctttgtt[139 bp omitted]caggggttagagactttcaggctgcagcaagctgtgatgacgccactgcactccagcctgggccacagaccgagaccctgtctcttgaaaaaaaatttaatgaatgtattttttattttttttaatttgtaatttgtaatttttgtgggtacatagtaggtatatatatttatgggttttatgagatgttttatactggcatccaatgcctaataatcacatcagggtaaatgaggtatccaaaaaattgaatctaggctgggtgcagtggctcatggctatagttccagcacttcgggaggttaacacgggaggatcacttgagcccaggagttcaagaccagtctgggcaacatagtgagaccccatctctcctaaaaatataaaaatcagcagggcgtggtggcaggcgcccatagtcccagctactcgggaggctgagtagggaggatcacttgagcccaggaggtggaggttgcagtgagtcaagatcacaccattgcactccagcctgggtgaaagagtgagatcccgtccttctctctctctatatatctatatatagatatatcgatagatatagctgtagctatacatagatatatatagattagatatagatttatatgtatctataaatacatatatacttttatatctatatctacatagatatatatatatatagttgttttttttttcttttgagagggagtcttccctctgtcacccaggctggagtgcagtggcacgatcttgactcactgcaacctgtgcctcctgggttcgagcgattctcctgcctcagcctccccaagtagctgggactacaggcgtgtgtcaccacacccagctaatttttttttgtatttttagtagagatgaggtttc[133 bp omitted]attaaaaagttgccgggcacagtaggtcacacctgtaatcccagcagtttgggaggctgatgtgggtgggtcacaaggtcaggagttcaagaccagcctgatcaacatggtgaaaccccatcttccctaaaaatacaagaattagcgaggtgtgctggtgtgtgcctataatcccagctgcttaggaggctgaggcaggagaattgcttgaacccgggaggcgaaggttgcagtgagccgagatcgcgccaccgcactccagcctgtgcaatggagcaagacttcgtctcagaggaagaaaaaaaaaagaattaaaaaatttaattaaaaaagtggagtcagtgccaggggcagtggcccacgcctgtaatcccaacactttgggaggctaaggagagaggtttgcttgaggccagcctgggcaacac[138 bp omitted]ctccgcctcctgagtagctgggattacaggtgcatgccaccaggcccggctaatttttgtatttttagatgatacggggtttcaccatgttggtcaggctggtctcgaactcctgacttcgtgatctgctggtcttggcctcccaaagtgctgggattacaggcattagccaccacacccggcggtaaatgaatagtttttcttaaagtggagtcaggccgatggttcatagtggccaccaggtggcgctgtcgacacagagcagccttgttgcaggcccccgcccggctgtggtcagaggctgagctgaaggtcagtggtgtcctcacaggtccacaaatggatttttgaggggtccgtgccctccggaaatcagatgtaaaacgtgtacattcatattgaatcttacaggggagaaggccaactgtgtgctaggggtctcgcaaccccacatcaacgaaccatgggcatcagggttctccctgcaagagctgtgtgcacgctgatgtgcatgtgtggattaaacacacgtgtgtgctcacgtgcatccatatatatgcacatgtgtgtgatgaaggagtgagcagacacagtggggaagtttaagctgggctcacgtctgtaatcccagcactttgggagtcagaggcaggaggattgttttaggccaggaacttgagaccagcctgggcaacatattgagagcccatctctacaaaaaataaaaaattgctaaaatattgccagccacagtggctcatgcctgtcatcccagcactctgggaggccaaggtgggtggatcacctgaggtcaggagttggagaccagcctggccaacatggtgaaactccgtctgtactaaaaataaaaaattggctggtgtagtggcaggcgcctgtagttagtcccagctactcaggagggtgagacaggaaaactgcttgaacccaggaggtggaggttgcagtgagccaatatcgcaccactgcactccagcctgcgcgacagagcgagacaccatctcaaaaaaaaacaaaaaaataaaaaattagccagacatggtggcacgcccctgtggtctcagctactcgggaggctgagctgggaggatcacttgagcccatgaggttgaggctgcagtgagctctgatgccaccactgcactctagcctgggggacagagtgagagagaagtttattccccggagcaccccattgggtctcccttgtggcccgcctcgcatcttcttaaactctgcatggcatatgtcttctgttcttgccttaggagttctgtttgctcagccgccggcccccacgccaacctctgctcccaacaaaggaggcggcggcggcggcggcagcagcagcaacgcaggcggccggggaggaaacaccggaaccagcggcggccaggctgggccagcggggctgtccacaccctccacatctacctcaaataactcgttgccttaaccgcatcactccccacccgccacccaccctggagcccgccggcctgggcagggggtccaggtgggccacacaggggccaggatggcggaagatacgggtggggagggaagatatccagaaaggagccacagctgacgccaaaaagaaaagaaaaaagatatatatatatatatatatatatacacgtatatatataaagagaatttaataaaacaggggaaaaccaaggaacacttgaatttctcaggttttggacattcagagagatgaattgtgagaacagcaaagaaatccatcagaaaaacagaaagaggcagacgtttcccagggcgttcaggcagccctgatggaccgaaggctctggtgtctggtttggccccacagcagtgtgggccgatcctgtttacctcatacatccctgcactgtgtgttttcatttttgtctgctttagttctcttttattttctattcaccacacactcaccactcccagcttctcgtgtccagtgaaacccctgaaccaagatcactgaatttttgtttttttcttgttgctttgggaaatttttttttctctgtagggtttttaagaggtttcgggggttttgttgtgtaaatattctattttattcttggggggatcaaaccttaggaaaaggatatctatatatctatatagctatatatttgtgttccttcagggaaactggtcttgaaaaagcaagaaaaaaaagcaaaaaaaaaaaaaaaaaaaaaaaaaaaaaactcacctttttatttttcccatgaccaatttgggtccctttgtccatttctgggggtgcgttgggcagctgtgagcccagcacatcggatccctggggctagagccgcggagccaatgaactcaggtgctatgggccgggctggggcagagggtgcatgctggggtcccaccggccaggggcccctgacagtgaattgctgactgtgatattccacgatgcttttgcttgtgccgtgcttgtctgctgggctctcgagtcaggggcctggaaatttttttttttttttttttttgagacggagttttgctcttgtcgcccaggctggagtgagtgcaatggtgcgatcttggctcactgcaacctgcacctcccaggtgcaagcgattctcctgcctcagcctccggagtagctgggattacaggcgcccgccaccacgcccagttaatttttgtatttttagtagagatgggggttttgccatgttggtcaggctgatctcgaactcctgacctcaggtgatctgcccgccttggcctcccaaagtgctgggattacaggcatgagccgccacgctggcccggtctggaaatcttatctaaaaagtagcaagtgctggaaaaagggcctggggggcgggggtggttcttgtcgaagcccccaggctcctgtctcagggatgaatgtggcgtctcattgggattcttctcttgcccgaaagggctgcttttgaggactatcaatactggggagtgggggtgaagccggacctcactcagggtgaggatttcagggccccggcatcctgaacaccccccacaccccaacattctcctcgctctgtcccttcctcttctcccaaccccttttgtgctggggctgcgagctccccgagttctgcggtgactaaatcgaggccgagaagggaggctgccccccaccaccctgtgggtcagtacccctccccctggcttggagaaagtggggtcaccgcagctgagctggggggttattttggctggagctgctggagcagaaaggctgggtctgaaatgcccagcagggtctggggacttcgttggacccgcgtggtgttgggcggggctgtcgtgtcctacacgggagctctgggctttcatttctcttggggtgcagtggggattaactcagctattcccagggtaagcctgggtctctaattgggccctgggagccctgttaggccaccggcatgggggcttggtgaggaaggggactccccagctccccccactcccaaccacctccccattgccttggagacccctggggagggggctggggggcttctgagcccctgagtctaggttcactttcccgtcgggctgtgggaggggactgtcactttcctgtgtctttggggaggggacccccacttccttctcggatctcagggccgtggacacacaccccctttccaggagggggtggtgggcgtctaggttttccttgtcccttcctggggccagcaccgtagcagcacaatcaccccgggaagggggtgtctgtttgcctccagacacaatcgggccccactcgcagaaccacctggactctgtccgtgtctgtcccccggcctccagggctcctctcccgggacccccgtcccacgcctgggccccgcgccgggggaagcgcctgctgcctatctctgtctacctcaggtctgacttttgatgccaaaatctgagcccctggggtgcctctcccccgcctcccgtgcaccagggtctgcagcagccactggggcctggctgcctgctgcatctggcggccctggacccctggggcccccgtgcacctgcccacctcggagcctggggaggggccgtgcagggtcgagggctgggtcgtctccctcgggctgcgtgtgtgtgtcgggaatcctgcgtgtcgtgtctgtgggcgatccggcctcccggcggtgggtggacctggattctaactcagaggacttgagcctgctgttaactccgatgattgtagggacaggcggggtgggtggggggtgggcgcgaggctgggtcccggcccaggagaaggaagtcgctgaaggcagtggccatgctggccgtggaaatgggaggcggttgcagagggtctatggggcccggtcctggatactcggcaggaagccgtgtctgcagaggctcctccctgcctcaggtggccccgttcaaccccagccgtgcccatctcctgccaccgcctgtcggtgggggtttaaattcggtgtggctttctggggtgcagctcagcacccccccttatgcagactgggagggggtcgggcagtcccctcagccacgaggaccctggatgggttctagttcacttgggaccgtggggcctggctgcgtactgagtgggtgccccacagtcaaggccaacgggggctccccctgctctgagatgttgggagaaaggcggcttctggaaccttccgtgggacccgtaagtggctgtccagaaaggcgggagggtgggcacggggcacggggggcagctggggtcgttgttaagggtcacgcatctgtacagttgaatttcctttctcttatcatgttttacccaccttgtcccttttttccccaattgtgcttttgcatttttttccttggcaaatgtaaactcagcctttcattcatgacgtgtgaaatttcagtttctctggagtttgtcagacggcgtgggaaccacgcctgaaactcaggtaataggaggaaaaaaaaaaaaacttaaaaaaatttttaaaaaacataaaactactctctacctctggctgggcccagcctgtctcgccctggccgcggcagggtggcctgtaacaatttcagttttcgcagaacattcaggtattaaaaggaaaaaaaaaaaaaaagacaaaaagaccaaaaaaaaaaaaaagtgtgattttgaaatttaaaagaacactgaaagtttacattttatagtaacattattatgcagattgtatttaaacttcagaaatatttaagacgattgtaaccctgtaaagctgatgagatattaaaacgagacaaaacacttctgacttttaacagaaaagtgtcctgtggtgttttttttcttttggcgtctccccaacctccagctccaccctacacccctgcccagcacagccaggggtgagtggaagggggtgctctatccccctctgccctgcatcgctctaggtctggttccgggcggcagagacagctacaaaagcgggggtctggccaggtgcggtggctcacgcctgttatcccagcactttgggaggtctaggagggcggaatcacctgagttcgggagtttgagaccagcctgaccaacatggtgaaaccccatctctactaaaaatacaaaattatccgggcgtggtggcgcgtgcctgtaatcccagctactccggaggctgaggcaggagaattacttgaacccaggaggcggaggttgcagtgagccgagattgcgccactgcactccagcctcggcgacaagagggaaactccatcaaaaaaaaaaaaaaaaaaaaaagcaggggtcctcagccagggtctgtgcccccagggggaccctggtccatgtctgggggcatttgtggttgtcacgcctgggggggcgctcctggtgtggagtgggtggagtcctgggatgctgctcggcaccctgagtgcccaggacggccccaccgcagagaacaatctggcgcccagcatccacactgcaggagttgggaaattctgccttcattatttaaggtggggtaaaaacagttctccctgcccacagcagacaccaggataagctcctgacagggcagacggtgtaaacccgggggaacccagctcctgggactcgcctcctctctccctccctactcagggcatggatttcagtgtgtgcagcctcctgggaccccagcagggccgaggatcatgggatgcagagtctgtagggggtccatggaatcccctaacccagagggccttaaccagggtgattccgcccccaggggaccctggtccatgtctggggacatctgtggttgtcccatctggggggagctcctgacatggagtgggtgaagtccagggacgctgctcggcaccctgagtgcccaggacgtccccaccccagagaaggatccaaccgcaaggtccacagggccgaggggagctcctggaggccgctctgggcacctctgtgcctcgctgagagcccgacaccaatcccgttttagggatttgggatgacaggtgtggcagggccagtgtgcgcacccccagccacctgcccacgagcctgacccctcgcctcctgcctcaacagggctctgcatgcgggcgcccctggcgttatccgaccggagctcccagggcaagtggcccggtccggcctcagggccttcacacagctgttccaccgccgggaacagccctctccccctttgctctgacagactcctttccatcctctgcagccgacacacagtccccgcctgcccatgacaggagggtgcggcccctcgggtgggaggcacggggctccccgctcctccgccctctgtgcggcccagatggaggcccttgtgccgagcgggacaccctgttcccgagccccccataagtttgccctccttcacctcctaggcgagcccaggaaccagcccactggtgaagccgcctggagctgaggcctctggggttcaggggcgtcctggtggctgggggagggaacttttccagtgctggccacattttcaccttttcccttacaacaccattcgggtcctaggaaacaagaccaagggccagatttggcccctggacagccagtttgcagcccccaaacccagaacatagtaaagggactcagctggggtcagaggttcacacccgtaatcccaacactcggaggctggagcgggaggatggatagagcccaggagtttgagaccagcctgggcaacatagggagaccccatttctaccagaaattaaaaaaaaaaaaaaaagccgggcatggtggctgcggtgaacagtgatcatgccattgtactccagcctgggcaacagcaagaccctgtctctctctctctcttttttttttttgagacgaagtctcgctctttctcccaggctggggtgcagtggtgcattctcggctcactccaacctctgcctcccaggttcaagcaattctcctgcctcagcctcccgagtagctgggagtataggcgcccgccaccacacccggctaatttttgtatttttagtagagatggggttccaccatgttggccaggatggcctcgatatcctgacctcgtgatttgcctgccttggcctcctaaagtgctgggattacaggcatgagccactgtgcctggccccttttttttttttttttgaatcagggtctcactgtgtcaaccaggctggagtgcaatggcacaatcttggctcattacaacctctgcctcctgggttcaagcgattctcccaactcaacctcccaggtagctgggattacaggcacgcggcaccacgcctggctaatttttgtgcttttagtagcaacgggttgggttttcaccatgttggccaggctggtctcgaactcctgacctcaaatgataacacccaccttggccacacagggccagccgggaccctgtctcttaaaaataataataaaaggccgggcacggtggcttacgcctgtaatcctagcactttgggaggccaaggtgggtggattgcctgagctcgggagttcgagaccggtctgggcaacatggcaaaaccctgtctctactaaaataaaaaaaattagctgggcgtggtggtgtgcacctgtagtcccagcttcttgggaggctgaggcaggagaattgctagaatctgggaggcagaggttgcagtgagctgagatcaacccactgcactccagcctgggtgacagagcaagactccatctct[192 bp omitted]aggctgaggcaggggaatggcatgaacccagaggcggagcttgcagtgagtcgagatcacgccactgcactccagcctgggtgatagagcgagactccgtctctaaaaacattaactaattaattaattaaaaattaaaaaataaaaggcctctcgttcttagcccacaaacccaaagaaagtggtattgcaacgttttcccaggaaagggtttcctgggccgcctaacccactgtccaccctcccattgcccacgcccaggggacgtgactggaggagggtcagcgtggctggaggtggacaggcccagactcagctgcccggcctcccgcgcaccatcctggccgaggctggccgggacacgtccctccccagggctgtgttggaggcgagggaccaacaacacccccacacctgtcccagccggttggttcctgaaacccacgttagaccctggccccggaagggaaaatggcattttccattccagccagaaatgagtctgccaaaccctgcgtcccggagatggagtcccactcactgcctggaggagcccgccggccccagggagaggagggaagaaccctgggaaagcccccaccccaaactggatcgtcaggccctgcttgttcacccgcagctgagggcctcagaggcggggagtcagggagggggtgcacctctgagttccccagcctgggagggagggactcagcccccagctctccccagccagggagggactcagccccccacctcctccccaggcccccacctctccccagccagggagggactcagccccccacctcctccccaggcccccacctccctccccagccaaggagggactcagccccccacctcctccccaggcccccacctccctccccagccaaggagggactcagccccccacctcctccccaggcccccacctccctccccagccaaggagggactcagccccccacctcctccccaggcccccacctccctccccagccagggatggactcagcccctcacctcctccccagcccaggaagggcccagccaccccctagcctctcagagcccagccacctccctgggccgcctgctaggtgcttgctaggagggcgggaggctcccggaggtgaagctcaaaccctcctctgatagccgattttcggagccagccaagagtccagactggagaggcggcggctgagacgcttccaaaagcagagggctaccagagccggctgctgctctccccactggcataggtaatgatggggctgccgcgggacggccgcagctgctgggtctgtggggccaggaccggggcagccaagccgactggggtctggctgggttcatcagtgcctgcaaactggcggtgctccataaatgtgcaggggatggagaatgagggccttacaccccgaggggaacgttcctgcctctgtgcctcagtttccccttcctggttacccccccttcacaacctccagctggcaccaacgagatccggccgctgggtggtctggagatgcccccaaagtgtggcttctgtcccctgctccaacacgattagtctgtcctcattccaggaaccaggctgggggcggggtgacctctgacctcacactgcagcctggcctggccacgtccccagggaggggaggaggggaggaaggcctggctcgggctgggccgcagcaggaggcctgtgagaaggtggagactgtagtccatcgacttcctgctgcccctgccctctcctgcctgtggcagcagcccacacctgcccggtctgctgggtgtcctggaacccgggaatttaaaaacttccaggctgggccaggcggtggctcatgcctgtaatcccagcaccctgggaggtcgaggaaggaggatggtttcaacccaggagttcaagaccagcctgggcaacacggcgagagcccctatctatgaaaaattaaaacgctagtcaggtgtggtggtgtgcacctgtggtcccgggaggctaaggtgggaggatcgcttgagccctggaggttgaggctgcagtgagctatgacggtaccactgcactccagcctg[219 bp omitted]gggtgaggcaggagaatcgctggaaaccagaaggcggaggttgcagtgagctgattgtgccattgcactccagcctgggcaacaagagcaagactcaattt[132 bp omitted]catggtgaaaccccgtctctactaaaactacaaaaattagccgggcgtggtggtgaacacctgcaatgccagctattcaggaggctgaggcaggaaaaccacttgaagccaggaggcggaggtcgaagtgagctgagatcacgccactgcactccagcctgggcaacagagtgagatccacctctcctgcttgtctacaaaaaacaaaaataaataaagtaaaaattaaaacaaggccaggcacagtggctcatgtctgtaatcccaacccttcgggaggccaaggtgggagcatcatttgagcccgggagtttaagaccagctgggcaataaagcaagaccctgtcgctgcaaaaaaagaaaaaaaaaaagcacaaaattagttgagtgtggttcctatggttccagctactcgggaagctgaggtgggaggatggcttgagcccaggaattggagactacagtgagccatgattgcacgattctcctgcctcagcctcccgagtagctgggattacaggcatgcaccactgtgcccagctaatttttgtatttttagtagagacgggtttcaccttgttatccaggatgatcttgatctcgtgatccacccacctcggtctcccaaagtgctgggattacaggccggagccaccacgccccgccgatttttttaaataatgttttttaaataatgttggaggccggcctcagtagctgacgcctgtaatcccagcactttgagaggccgagacgggcagatcacctgaggtcaggagttcgagaccagcctggccaacgtggtgaaactccgtctctactaaaaatacaaaacttagctgggcgtggcggctcacacctgtaatcccagctactcgggaggctgagacaggagaatcgcttgaacccgggaggcagaggtagcagtgagccgagatcgcaccattgcactccaacctgggccacagagcaagactgtcgcaaaataaagaaagaaaataaaaatgaggttggaggaaactctggaggcacagcaggtccttggattggactccctccctccctcccaggataaaatgaaatccaggcctcgttcacacggccctgcacggcccggccccgctccgtggtcctgccccagggccttcgcacgggcctgccccgcacacggttctctgggggtcgctggctccccgctcaaacggcccctcctgccgaccaggcgggtccccggggccgccctccctctggcctgggctcggggtcggtggctcgcgcctgccacctggcggccagcggggctgcggcgccgcacgctctggcaccagcctcctgccccggccgtgccctccgccgggagccgcggaccaggagtcgcaccgcctccggggaccgcaccccgcatgcagcctccagcccctgcctcttgctgctcgagggcacacgacccaggtcagctgcaacccccgggcggaaatcccgacttttaaatgaatgctccctttttatccctttttaaggggttggcaactaattgcacattttaaatcatactgtttttaggccggacgttgtggctgaagcctgtaatcccagcggtttaagaggccaaggcctaagcccaggtgttggagaccagcctgagcaacacagtgagaccccccatctctactagatatatatttagtataaataaataatagatatatgtttttctttgagacagagtctcattcgcccaggctggagtgcctgggatctcggctcactgagacctccgcctcccgggttcaagcgattctcctgcctcagcctcccaccacgcccggctttttgtactttttgtaaagacggggtttcg[132 bp omitted]atggtccgtgacgggcagccgtgacatgaagttagaccctgcttggctcggacagaactggcgacttgtttgacctacaccaagctatccgactaataatttagatgttgaggcccctaaagag[134 bp omitted]ggcaggacagtgagaccctggctctacaaaactaaataaataaggaagcagtgaattccaatgtattcatcgccaactagccatgttgctgggtgtgcgctctctcttttaggcgcaatgtgtcatttaggcctgtgacgtcggaactttattatttgaacatttaaaaataaatgaatccaagagcttgagtcacttggccaaaaatgcccaggaggaaaaggccaagtcaggtaccccggctctagagctactaactgatcgccggagaccctgggccttggaagaagtcgcctccccagatctctaagcaggccgcgcgaccctcgagtctcaggtaagcgggaaatcccacttcacaagaaagcccctctctccgaggcacgggcgcatgcgcgggtcggccacccgctggggccgcggggccgccgctctggcccgcgtggggcagtcgtccgcgtctcgctcatgatgacgcacgtccggggcggtggggaaggcaagatggcggcgcccatggaggtggccgtgtgtacggactcggcggccccgatgtggagctgcatcgtgtgggaacttcactcgggcgccaacctgctcacctaccgcggcggccaggcgggaccccgcggcctggcgctgctcaatggcgagtatctgctggcggcgcagctgggcaagaattacatcagcgcctgggagctccagcggaaggtgcggcggtgcggtctcgctgctggggtcatggggcgcccgaggctgaagtcgggggatgggttggtgggggccgcgtgcacccttagtcggaattggcgtggggaggggaggtggtctccgttcgggcgctctgcgcatgcgcgggtctgggggctttggggagatacgtgcgacctgttaggccgctctgcgcacgcgcggggctcaggcctgagctgctatgggggcagtgggggaaaatgggagacgctccggggggtcccttggggcaattgcgcatgcacgagttcttggagcgcgaaatttgattaaaaggggcctatgagctctgtggatgttgtggttctggaggaaaagggagaaggaccaaggtctgggggagtctcccatgaaggggtggcgcaggaaactcatgtttattcctccaataaagcaacagatactcaccgtcgcccacagtttcccctctactcccaagcccaaatgcagccagtccctgaagctactcgcttcccccgtgtgcccgctgagatctcttgggactggctctgtgctccagcattgcctgatggagtctacacacaactcataaatttctcccattttattttagttttgagacagggtctcactctgtcgctgaggctggagtgcagtggtgcgatctcggctcactgcagcctctgcctctagggttcaagcgattctcgggcctcagcctcctgagtagctgcaactacaggcccgcaccaaccaccacacccggcccacatttgtattttttgtagaggcagggtttcaccatgttggccaggctggtctcgaactcctgacctcaagtgatctgcccacctcagcctcccaaagtgctgggattacagccgtgagccaccacgcccggctgagttttcccattttagagaggaggaagctgaggcttggggtcttaggttggacattatggatagaaggattggggcacaagcctactgggctcttgggccccagtgtccttctggatcctctttgttctgttcctgtactcctcccacccagggcccctctgaccctcagaggaagcaccaacctcacatctaccacctccagcctcgaagcctcttgcaggggcgaacacttccttgctggaccatgcatttgctcaaaccaccctgctcccgactcctcttcctggttctctgacttagccattgcccaggcgtcccctcccctcgccctccactgctgtagtagctcccgtgtcctgcatggggctcacgaggctgactgtgcatccttaggaccagctccagcagaagatcatgtgccccgggcctgtcacctgtctgactgcatcacccaatggtctctacgtcctggcaggagttgcagaaagcatccacctgtgggaggtaagaggagcaaagcgtgagcgtttcccacaggacatctcagcccatctgagctttgcctgcagggcaccagggaacaaccatgcggcctggggccctgggatgggtgactgctcaggggttatagcctaagcttcaccctgctgcctcctttctccaggtcccctcgagacttgcgaatcccagaccagccctaatcctgccttgagtgcttggatagagcccggtgcagcccagtccccggcactcacacaccgcagcatcttccagggctagcgggcatctcttccacgcaggcggcagcgcctggcacttgtgacttgaaagttataaagggcggccgggcgcagtggctcatgccggtagtcaatgcaacctctgcctcccaggttcaagcaatcctcctgtctcagtctcctgagtagctgggattccaggcgcccaccaccacacctggctaatttgtttgtatttagtagagaagggcttcacaatgttggtcaggctggtctccaactcctgacctcaggtgatccacccgcctcggccccccagagtagtgggattacaggcgtgagccaccgcgcccggccagtgcctcctttttcttaccgctggaccaaccaggtgacagcaactcctagacacactcacagcccggatcctgccatgctctcactgcgagacagagtgaactgttcaggctttgcatttaggccagcttctcagctctgccctggtgaggggaagcagccctggatgatgtgtgagtgagtgggcacagagatgtgccagggagacttcattcacaaagtcaggcctcttggagtttggcccataccgtagctgtggcgttagatcaccggctgtgttgtcacaaatggtccattatatttcgggggagacctgccctcaaccccacatagagcagggcagacagtacaagatctggggccagaagacccaaaggtaaccatgtttctgcccttcctgaccttgtccttgcttccctcagtgggctgctcagagaactgagagggctgggtgggcatgagcattctcggagagataaaaaagccaccaggggatgggcatggcggctcatgcctggaatcccagcactttgggaggctgagacgggcagatcacttgaggccaggagttcaagactagcctgggtaacatggtgaaaacccatgtctgcaaaaaatagaaaaattagctgggcatggtggcatacacctatagtcccagctttttgggaggctgaggcatgagaatcacttgaatccgagaggcggaagttgcagtgagatgagattgtaccactgcactccagcctgggtgacagagcaagaccttgtctccaaagaaaaggggggtcgggacaggcagcacaggaatgacaggaggcatcattatctcaccctcaggacacgtgtgtatgtatttaatttttaaacttatttttgagatggggtctcactacattgccgtagctgctcttgaactcctgggctcaagcgatcctcccaggtagctgggattataggcatgtgccaccatgcctgggatcccaaggcttttacatctcactccatgattttgaaactaggatgcagttgctgagagggaaactgaggcagggaagcagtagctcacgagtcacccctaacagtagacctcctagccctggttgctgtcagtctggtgcagaggggcatgtgggtaggaattaaatgtgtcatcgccccatgggggatgtcttaggcgggaccccttcctgttcttggctcgggacagtgtgctgggtggcacccactgccagacccctgctcccctagccgcctccagtttttttttttttttttttttttcagatgaagtctcgctctgttgcccgggctggagtgcagtggctcaatctcagatcactgcaacctcaggctcccaggttcaagcgattctcctgcctcagcctcccaagtagctgggaggcgcccgccaccatgcctggctaatttttgtatttttattagagacggagttttgccaggttggccaggctggtttcgaactcctggtctcaggtgatccgcccttctcagcctcccaaagtgctgggatgacaggcgtgagccactgcagctggccctcctggagagtttctgacccgtgagctgtgaccatgaaggggtgtcccacatagccagagctcaggccgggactgcctccactgtacccccctgccacggtcgaaatcctcctcctgttctctgtgtaggcgacgggtgtgtgagcggtgagtcaggagtgggctggaaacctgagagccagggctgtggggcgggagctggtccgcccctcccacgccacagggacagggacctcccgggaggcactgatgttctgaagctgcccggtctgtcccggccctgggcagtggtggtcaccagagctgccctctgtggtttggggctgacctggatcctgcttcctctggtgccatttaaccctccccagccaccctgggttttgcatgcgaggaaagcgaggcccagagagggcatggctgtcagatctgggcccagcaggctctgcctgccccaacaaagcacgacgcacagggactttcgacaacagaaactcggcccccatccttgaggccagacgtcctaaatcaagatgtctgtggggccacgctgcccctggaggccctgggaggagccttcccacctctccggtggtggccggcaccccttggcacccttggcttgtgggtgactgtcccctgcctctgctgccaccactgccgcgtggagcccctgtgtgtttgcacttctctcagcttacaacaaccgggacacatggatggatgcccccgctccagaaccacctcatcttaacttatgatatgtgcagagacactgcgtctaaatgaggccattcacaggtcccaggtcgggacttttaacatgcttttggggggaaacacgattcaatccacaacccccaccagagcatctcagctctcgaatccacaaccccccacagagcatctcaggcctcgaacccacaacccccaccagagcttctcagccctcgaacccacaaccccccagagcatctcagccctcgaacccacaaacccccccaagagcatctcagtcctcgaacccacaaccccctccagagcatctcagtcctcgaacccacaaccccccccagagcatctcagccctcgaacccacaacccccaccagagcatctcagccctccccaggtgtcctggaaggggctccctgtcctcttcctcagatggagctgcctggcttcctgccggagcttaagctgccaccaccctgggtcaggccaccacagcctgcccagaagcgacttcctgttgaatggtgggagccgcctgcaggtcctgagtgcagccgttcctacggggcccacacaggacgcctggggtcaggctcacaggggaccagcacctccctgaggcagcagggaagggcaggaaacttgccccttcctgggccatcatgcaggtggggacgaggcgggaacaggtgcccacccagcccaggcaggggcgcgacgaggccccgctgtacctgctggccgctgccctgacagggtcaccccgcagtcctggggcagggcaggcagggggcgacagtgtggccatggccgtgcagtggtgggttcctggggctgcagcccccctttcctcccctggggctttcctcccctgacctggataccctctgcccctcacaggtctccaccgggaaccttctggtcatcctgagtcgacactaccaggacgtctcctgccttcagttcacaggggacagcagccacttcatctcagggggcaaggactgcctggtgctggtttggagcctctgcaggtagcgccttgcgcactcaggcctgcacctggaactgcacccgggctcaggcggggagaggaggcgccaaggcccctggcgggaaggggcttctctcttgggggctggagtgcagaggacggagtgatcatcccaggggtcctggctgcccacactggggtctggtttgttctgggggccgtgggggcccagccttgagtttactcaggtgaggcaggccaggctgctgagtggaggcaggtgtgtgcgtgaggtgggtgctggaggcgtggactgccctgttccctccgctccccgcctgctgagcacctgccccaccccgctcagcgtgctgcaggccgacccctccaggattccggcgcccaggcacgtctggtctcaccacgcgctccccatcacggacctgcactgcggctttgggggccccctggcccgggtggccacctcctcactggaccagacggtgaaggtacgccgcccccaccccaccacggtccatgagcggagcccagcagccgcaggtcctcagccaggaatgcaggaatcgcctcctcccgctccctgctgtcaggactccagacggcttttaatcccctggtgctctgagcccaaggacgtccagggaggtctgccagcctggaaattcctactcattcaccgtttctggcccggctccctggccaagcctggggaatcggaggtcatcactatgcttgagtcgtgaccggtggtcctgggagggagaaccaggggtcatcagccggagaccaagctccatttcagcacaggccatgtcccctggcccccaagacccacatggtgacggctttcacccaaagtcgcaagccctagggccagaggacagccgacgcctgacctccctggtgcccctgttcccatggggtcctcgggttccccctgccgggccgagccccacgccctttgcccacccgcagctatgggaggtctcctcgggggagctgctgctctccgtcctctttgacgtgtccatcatggcagtgaccatggacctggctgagcaccatatgttctgcgggggcagtgagggctccatcttccaggtcgacctcttcacctgggtgagtgccgcggtctgcgggctgcaccctgccctggggctgagggcatcgggcctgcggctcacacacgtctcggccttcgcagcccggacagagggagaggagcttccacccagagcaggacgccgggaaggtcttcaaagggcacaggtggggacgtgggaacggggcgggggctcccaggcacgtcctgtctggcacgtcccaggtgacccctgtctgtctgtccaggaaccaggtgacttgcctgtcagtgtccactgacggcagcgtgctgctctcaggctcccacgacgagaccgtgcgcctctgggacgtgcagagcaagcagtgcatccggacggtggccctcaaaggtgggcgcgcctctgctcggcccgcggccagcgcgcaggggaaaaagccagcaggagctccgggcttggcttgggtgggggcggggactggtttgctgtggggcggggccgggctgggggcgtggactggctgtggggcggggcctggctgggggagtggactggctgtggggcgtgggctggctttgctgtggggcggggcctggctgggacggggcggggcctggctgggagcgtgaactgggtttgctgtggggtggggcctggctgggggcgtggactggctgggggcgtggactggctgtggggcggggcctggctgggggcgtggactgactgtggggcggggcctggctgggacggggcggggcctggctgggacggggcggggcctggctgggggcgtgaactggctttgctgtggggtggggcctggctgggggcgtggactggtcgtggggcggggcctggctgggggcgtggactggctgtggggcggggactggctgggggcggggactgccctggatggggcggaacttggcttgctgtggggtggggcctggctgggatggggcggggcctgacctccgcgccccccaggcccagtcaccaatgccgccatcctgctggcgcccgtcagcatgctgagctcagacttcaggcccagcctgccgctgccccacttcaacaagcacctgctgggcgccgagcacggggacgagccgcgccacgggggcctcactctgcgcctgggcctccaccagcaggtacggcccccagcagggaacccccactgcccttttgtcccggaagaccccgcgggccctgggctccttcgctcccttggtcctggcgcccgtgcggcggttccccacaagcccggcactggagggcgcgtcctgtgagtgggatggtgatgctcggtggggcctctgcccactctcagtatggacccagaggctctgagaagttaaccacccctcttcccccggccagcagggccgagctgcacgccccacacaccagccttcctgcggctggatatctgacagtcagttaggtctttctgcaaaaggccgatgccccatacttcgggctgtgagagccaaaaggttcacgtctgggctgccgaaggtgcaggagcagccgtgagggcagggagcgggtggggccctggtggctgcaggtggctcccacgtgggctgggggcagcctctcggcctggccacagtcacgccctcactccctgcagctcagcaccgacccccgctctgtgcaggtactagggtgggctcccttaccttctgagggtagagtgacttccggaacacttcccaccccagccccaagaccctcatagaagccagtgtggttggctgggctgggctggggtgggggctgggggttccttgggcctggggaggcttcccagtgtgtttccgcctcactccccgaccttcgatgagctgcctgcgtccttggtgtctcacgtcactgtctgtgtccctcgctgggctctggcgcttggcacttctccccacgcgccctcttcttacctgagtacagattgatttttttatctggagggtgcccgacagcctgatggcctgacaggccctgcaccaggagatgccgttatctcccttgtccgtgcttcctcatggagtgacactctgttttcccacatctaccagtgggcttggggcgggcaggcaggggaccgccaccgtctgggcatccgcaaggcccctcagactgcaaggaggccaggagcacaggctggactgactgctaacagcgtgggcgcaaggaggggcgagctttttgttcagaaagtgccggaactttcggagtgaaaacaggcctccagcggcagagccagctccacgctagggcgcctgcccggccactgcctcctcctagggcagcagcggttcccacgattcctgcccagccaagcgctctccctagaaccccacctagttggccacagtgggattccggagggggccaggccatgccctccggtaatgccgccacctttccctagccgccccacctggctcccttcctcccgtgacggctgctagtcctctgtgacccttgttccaatccagctgacactggaatgttggcctgtcccacagacaggcgctgctggggcccaaggcgcttcgtccaggaggcgggttcccgacctctgatcccccagcaacgtccctccatgtaactggttcctctgtacagggcagtggccttgctgggccggccaggctctccccatggctggaggtgctcactgtctgtgaggccctcgccaggccctgtgtcccagagccttccctgggcttgcgggtccttccaggtctggcccaggcccctgtctgtggtgtggccatctgcacccccatccccagccacatccttgggcgcagtcgtggaggatctgaggcgctgggtaatgactgcatggccagggtcagggttgtcatctgcaggctcgacggaggtgaacgcccccgtctcagtcttcccttctgtctgtgggcgtcacggtggcccctccctggctgagtggctgcccacgctggcgggggtgggatgggcaaagcgtgtggtgtgtgacaggacgcgccccgaggtcacgtggctccctgtgttacagggctcggagcccagctacctggaccgcacggagcagctgcaggccgtcctgtgcagcaccatggagaaggtgggcggggcctcgggaggggcggggcctgaggctggggtcagtcctggccagtgggggtgagtggcccccctccagcacaccccaggccacttctgccctctgaccccgacttctcccgcagagcgtgctcggcggccaggaccagctgcgcgtccgtgtgacggagctggaggacgaggtgcgcaacctgcgcaagatcaatcgggacctgttcgacttctccacgcgcttcatcacgcggccggccaagtgaggcccggagaccccggcccgaggcgcccaggcctgagccccatgcctcccagcaaccagggcccgcgggtgtggcccccaccagcccaggcctggactctcctcagttctgtgtcgtgttcgggtttttcctctgtgactgggccgtcttggtgtctcgtggcacgcgtcacagtggtgctagtctgtttttaacaaaagaggatgaaaagcccctcctctccggcctccttgtgtccgggtgtggcctggtgctgcgtgcaacacagctcccctgctgctcggcccagctgggaccccagccccactcggcaccctctgtccggaggtgggggccttaaccaacctaggcctcgcgggggcggctttaagagggagccccgagcacctgcagttctgactctgctctgttgcccgagggcctttgcatggccgccccctcccgagaaggcgctggaccggggtggtgggattgaggaaggaaccgggaagccaggcccctccggtctgctgtgcagggggtctgagtggagacagccctgtggggtcccggaaggaggtggcttggtgtagagagacgggcctggggacgtttgggggtggacccagccgccagggttgaggggtttccccgggtgcaggacccagctctcagggagggtttcgggggtccctggtccctgtggaaacgcagggctcaggaccaggcaggaggagggagctggtgtgggtggggccttggagcacaggctcctcccagtgcatccctcgggtgccttggggcccctgctggcttccccagggcccagctggagccgcccaagggtgaacccagggtggttctccgggcaaaaggtgccacggcctccccaggcagaggtggcttgccccacccagcaaaggtggccactgcaggctgggaccgtcagatgggtcaggagcaggtctgggggtggtgtcccgatctgagccggtccccagagggagttggacccctgccacaccacaagccgtgcttgtgggtatcaagggcttgagggaggtcaggccctgctgccctggggacgctgccacccagcgcctggatcccagcccagaagcccagaaccttccagaaagctgctcccgactgacagtcctacctaacgatccagaaaatccgtgtgatttagcgggcgtggtaatgaccgcagtccagccagccgccagcgctgagttcatgcttttaggctaatttgtgttcttgtcccctctatggggctctgagtcctctcggctggcagcctggccacactgcatcagggcagctgggccctcacctggcactgacatctgcctcggctgctccgagccctgagaaccactccagggtcccttccccctgggcgcacggccagcttgttccttttccatcatgaaccactcactctgctgacctgcaaggctgggtcctgcctgcggggagcacgcggatttggggtgaggcagctggggggtcccttggggttggctgatctccctgggtctgtacctactgttcccctggagccattcccacgacccctgcccccctccgcatcaccacccaaaggctcccaaatttccctcccagcaccaatcaggacccccaaccaccaactcaagggtatcggcacaaccctgtggctggtgccagggcggggtgagggtgcgcagagccgtagagggacagctgcctggggctcccagggcccggactcggctccagccgctgcaagagcccaaggtgagccaggcacgaacatccaggtcacttcgcagctgcctgcaccacgcggccgtccggggctgaggtcggctgccctctccgcaggctgcagaacagggttagagttcaccgtggggcagggcccgaaaatcgcccggtggcctcagacaggcgacacctggccgggtcggactcgacgttcttgtctccagaaaggggtcgtcccccggcgggtcggctgggagctgggcgggggcggcaggagctcacgcctcattccctgcgtttccctccatgtgcccctgcacgctgggtccttggacacaagccccctcggtgcctctccacgcccgctcccgcaccgtcatcaccctctcggcccagagctcccagacgtgctcaggcaccgcggctccaccctgcgtcgtaattgccggtctgggtgcgatggaaacagtggtgacgtcatcgttcagaccccccgcccccggaggccccacagattctcagagggacggcgccgggactggggaggccaaggcgttgacgagcggggacgccggtgtgcacaggtgacctggcggctggcggggcttgactgtgcagaccacagtgaggtgcgcttgcgggcgccgggacagctgccagcaaagctgagagcagaaaacatcatgcgcgaggaggtggggaagccacagccttcccgtgccctggtgcggacataaaatggggcatccactgtgaaaatagtctggcaggttttttgtttgtttttgtttttgtttttgtttttttgagactgagtctcactctttcccccaggctggagtgcagtggcccggtctccgttcactgcaacttctgcctcccgggttcatgccattcccctgcctc[222 bp omitted]tggacccagcgagtccacttctgggtatatacccaagggaatgaggagcagggtttgggaatgaggagcggggtttgggaatgaggagcggggtttgggaatgaggagcggggttttgaaatgatccacacaccaagctcacaacagctccatccccacagccaaaaagtgggggaaggccaggcgccgtggctcacgcctgtcatcccagcactgttggaggccaaggccggtagaccacctgaggtcaggagaccagcccggccaacatggtgaaaccccatctctactaaagatacaaaaattagccaggtgtcgtggcacgtgcctgtaatcccagctacttgggaggcttaaggcagaattgcttgaacctgggcggtggaggttgcagtgagctgagattgcccccctgcactccagcccaggtgacagagcaagactccgtctcaaaaaaaaaaaaaaaaaaaaaagttggggaaaccaggtgtccatcagcggttggatgggtcaccacaacacgagtcctctgcacagtggaatattattcagccttgtaaaagaacgagaaggctcaatgcagtagctcaccctgtattccagcactgtgggagctgaggcaggataatcgcttgagcacaggagtttaagaccagcctgggcaacatctctacaaaaccccatctcttcaaaaaatataaattttagccaggtgtggtgtgcacctgtggtccccgctacttgggaaatcaaggcaggaggatcgcttgagcccaggaggttgaggctgcagtgagctatgatctcactactgcgctccagtctgggcaacagagcgaggtgcagtctcaaaattaaaaaaataaaataagtgaggctcagacacaggccagagcatggttgcaccttgaggacatcacactcagtgagagacgccagacacaaaaggacacgtcctgtctgattccactcctaggaggtccctagagttgtcagattcacagagacggagaggataggaggcgtcagggctggggaggggacggggagtgagtgtcccctggggacagagtttcagtttgggaagatgagaaagttctggacaggagggtggtaagggctacatagcaaggagtgtgcttaatgtgcctgagctgtgcacctagaaatggccaagatggcaggtttcatgttatgactattttcccacaataaaacattttttaaaagtctcctccacgtggccacttgttccacatggcagctgggagtaggaacgcctactgttgcccgtgtacagatggggaaactgaggcagggcacgagggtgagttcccggagggcagacacagtctctgcccctaggaactcttgctcctcagagggagccgaacccagggagggacggggccccagtggtccctgaggacaccaggacccagcacctctcgcagacccagggaggggaccccttgtcctgcccccggggacacctggccagggggctggagggggtggcctgcgggttcctggaaccgagccatccctccctccgtccctccccagtcgtctcaaaatccaatccattttactggctggcacttggcattttattcatttcatggaggatttttttcctacctctccaacgctggctccaaaaggagatgacgtttggggtgtgtgtgtgtgtgtgtgtgtgtgtgtgtgtgtgtgtgagaaaatcgccggagtgtagatccattaattagagctgaatgttcccaacacagcggctgttctgctgccccgcgggatctggggagacaccgtcgggaggacaggatgaggaatgcctgggcagggaggaggtcctctgctagatggatagacggatgcagccgcccccatctatcaggcgcctgtgggatgccagggccccagaaggcaccccccgaggcccagaggacataggcaggcttggggactggtagacagcggggagctatggaaggctctagagcactggaggaggggcatgtgagcaagcatccttgtctgggccgttgctcaagccacaagcaattatagagtgcctactgtgtgccagcaaccaaaccagacccaccccaaccctcccagagctgagttgaagagatggtcactaaataagaaggaaatgaacaaaaagatggtaggccgttatggaaatgtgtggaggttgggggtgggtagcagcaggactgaaatggggcagggagtggtgctttctgcattttctcagtggcaagcagggaacgtttttcagggcagggcatttgggactgggttttgaagggtgaagaggagttctgtggcccaagttgcctgcccactgctggagggcagatctactctataggtttccatcagacatgcctgtctcagtttccccagggtgcactggatgttagaacacacccctgggctggcctggttagaaactgacagctccctggatgtgcgagacaagcaagacccttcctgggcctcaacttccctgcctgagcaatggtcgacattggtggaaggggtcagggatcctggagaggaacggggtgggcgtc[132 bp omitted]tgcctcagcctcccgagtagctgggattacaggctcccgccaccacgcccggctaatttttgtatttttagtagagacgggctttcaccatgttggccaggctggtctcgaactcctgacttcgtgatctgcccgcctcggcctcccaaagtgctgggatgacaggtgtgaaccaccgcgcccggcaagtcggggccaattttaaagcgcagtcttttcctggcacctccgttccatctgtggcctgaatcagagcagggatgggcagtggttaggcgtccccggcccccgccaggtgtcaccgccgccggcctcaaacaaccactgggaggcactgtttcccccccatcccgccctgggcagggcacgtcccactccccccgcgcggttgctgggaacccggaggccgcccgggcggagcgcggagggcgcgtcggaacctggccggggccctccacccgcgccgtggtcccggtggttgcgccccgtggcgagcgacgccgacaactttgcgatggagtttgtgcgggcgctgtggctgggcctggcgctggcgctggggccggggtccgcggggggccaccctcagccgtgcggcgtcctggcgcgcctcgggggctccgtgcgcctgggcgccctcctgccccgcgcgcctctcgcccgcgcccgcgcccgcgccgccctggcccgggccgccctggcgccgcggctgccgcacaacctgagcttggagctggtggtcgccgcgccccccgcccgcgaccccgcctcgctgacccgcggcctgtgccaggcgctggtgcctccgggcgtggcggccctgctcgcctttcccgaggctcggcccgagctgctgcagctgcacttcctggcggcggccaccgagacccccgtgctcagcctgctgcggcgggaggcgcgcgcgcccctcggagccccggtacgcgggacgcccggagtcaggacgagggggacccggggcgggagcggggtcgggagccctggggacgtccggagtcaggatgggggtgccgggactacgcagggaagggggatcccgggacgctggacgggccccagggatcagggatggggaagacccgggtgtccccggagcaaggaaaccagaacccagaggaagagacccaggggcagggacctagacgcggggttgagagctccagggacgcccctggaacgcccctgcagaccccttcccagcgccctggtgatggggaccccgccactgtggcctctgccccttccttgcccaggccccttccctccttccccacagacccttccctggtccctgggacctcctggtccccacccggctctgggtggctgggctggaggacaggcggtctccctcctcactctaggggtgcagtttcggggtctgcaggtctggatctccctccttccagcattctccccgtcccctcccagaggcctccaagatcccagagcagcctccatcattccaaccccgactccattcccaccccccaacccctggcagccttcaagttcctctcttctaaccccaccccaggcccagatcccgggaggaaacggaagaagagaagggcgattgactgggttctggggtccctgttgtcccccccaacagggctcactgcgccccagataacaagccccctcccgtggccagcaaggaggtcccaactccggacatgggcctggctgagctctatgccccagctgcccctccttcccaacccactcagaggcccctccagcccctccctctcctcagggagggagaccctgacgctagagggggggtctcttagcccagctctccaggtgtcaaggggacccctgtccccccaccgccctagggctggtgggagaggcggggcccaaacccaggcctggggcgccctctgctgccgtctccaggagctgcaccgccgcaagccggggcgtgggaccgacctagcgtcttagggactggcttggccccctggggactgagccccatcccaagcccatcctccagcactgggcaccctgcttccaccctgggaagcgccctgccaacccgaggggcctggcaaagctctcccacctttaatatactaagttaaatccagggccgggtgcggtggctcacgcctggaatcccagcactgtgggagcccaaggtgggaggacagcttgagctcaggagtttgagaccagcctgggcaatatggcgagaccccatctctacaaaaaatacaaaaattaactgggcgtggtggtgggtgcttgtaatcccagctactcaggatatatatatattggctggg[138 bp omitted]aaagctgggagtggtggagcttgcagtgagctgagatcacgccattgcactccagcctgggagacagagcaagactccatctcaaaaaaaaaaaaaaaaaaatccaggagaactttctggatggcactgggcacaagggggcccctcagccctccatgtgcctggcacggggcagtaatgtgtgaaggggatgctaggggaagctacctggtttggctctaagcacaaggccatcggtgggctcacctttatgagccacagctcttggccctagaggggttcccaggcaggtgggtgccaggtgaggtcaggactgtaaaggaatcagggagggacctgaggctggaggcgttccaagctggagcctgggctctgcctggaggatggagaagtctgaatagaggaggagcaatgtgcttgggttttgaaggatgtgtaggagttggtgggcatagagagagaaagatattccatccggggaatggcacatgcaaaaaaaaaacaaaaaacaccaagtgtgcccatgacaagggtagctggagccaagagaggctgggagactgagctttgtggggatggtgatggggaacgatggaagggtttagagcagggctggggctggggggaggtggaggggaggtgcagccatccagctggcatctacttgcggatcacccgctgctggggtgggaagggttttgtgggggtggaggtcgtcaaccctaaccgtggccacccctctcccagaacccattccacctgcagctgcactgggccagccccctggagacgctgctggatgtgctggtggcggtgctgcaggcgcacgcctgggaagacgtcggcctggccctgtgccgcactcaggaccccggcggcctggtggccctctggacaagccgggctggccggcccccacagctggtcctggacctaagccggcgggacacgggagatgcaggactgcgggcacgcctggccccgatggcggcgccagtggggggtgaagcaccggtacccgcggcggtcctcctcggctgtgacatcgcccgtgcccgtcgggtgctggaggccgtacctcccggcccccactggctgttggggacaccactgccgcccaaggccctgcccaccgcggggctgccaccagggctgctggcgctgggcgaggtggcacgacccccgctggaggccgccatccatgacattgtgcaactggtggcccgggcgctgggcagtgcggcccaggtgcagccgaagcgagccctcctccccgccccggtcaactgcggggacctgcagccggccgggcccgagtccccggggcgcttcttggcacggtgagtggggaccctgcttcccttaggagggtgtccaggc[131 bp omitted]ccggccaacatggtgaaaccccatctctaccaaaaaatagaaaacattagctgggcgtggtgacacgcacctgtagttccagctactcaggaggctgagatgagagaatcgcttgagcctgtgaggtccaggctgctgtgagctgagatcgcaccactgcactccagcctgggcaacagggaccctgtctcaaacacacaaagtcaggatgctttgttagatgtcttaggtccccggaagcagtgcccacctggggaactatctcagggacagcagagaacgagctgaacaactaggagggagggaacgggtctctggctgagccctggaggagttcctgagaatgaacaactcctggaaacaggtgaccccagctgggtgcttgtgtgtcagtcactggcttcaggcgtatgtggagtgggggcacagccacggcatcgggcacggatgccccgggatcaaggggttaggcttggggactaggcttggggacaccaggagcgtccacgtttgtcctcatgatacggacaagagcgaccagtgggaatcgggcacgtgctgggcaggggtgagaggatggaggggtgtgaacttcgacacctgacaccccccccgccctgcccctaggttcctggccaacacgtccttccagggccgcacgggccccgtgtgggtgacaggcagctcccaggtacacatgtctcggcactttaaggtgtggagccttcgccgggacccacggggcgccccggcctgggccacggtgggcagctggcgggacggccagctggacttggaaccgggaggtgcctctgcacggcccccgcccccacagggtgcccaggtctggcccaagctgcgtgtggtaacgctgttggaacacccatttgtgtttgcccgtgatccagacgaagacgggcagtgcccagcggggcagctgtgcctggaccctggcaccaacgactcggccaccctggacgcactgttcgccgcgctggccaacggctcagcgccccgtgccctgcgcaagtgctgctacggctactgcattgacctgctggagcggctggcggaggacacgcccttcgacttcgagctgtacctcgtgggtgacggcaagtacggcgccctgcgggacggccgctggaccggcctggtcggggacctgctggccggccgggcccacatggcggtcaccagcttcagtatcaactccgcccgctcacaggtggtggacttcaccagccccttcttctccaccagcctgggcatcatggtgcgggcacgggacacggcctcacccatcggtgcctttatgtggcccctgcactggtccacgtggctgggcgtctttgcggccctgcacctcaccgcgctcttcctcaccgtgtacgagtggcgtagcccctacggcctcacgccacgtggccgcaaccgcagcaccgtcttctcctactcctcagccctcaacctgtgctacgccatcctcttcagacgcaccgtgtccagcaagacgcccaagtgccccacgggccgcctgctcatgaacctctgggccatcttctgcctgctggtgctgtccagctacacggccaacctggctgccgtcatggtcggggacaagaccttcgaggagctgtcggggatccacgaccccaaggtgggcggcctcggggggctgcgggtggccttggggggctagcggtggccccgggctgggctgtgtggggcaggggtggtcagctggacgtggaggacgtccactaggccaactctggtccc[137 bp omitted]ccaacatggtgaaaccccatctttactaaaaaatacaaagaattagctgagcatggtggtgggcacctgtaatcccagctactcgggaggctgaggcaggagaatcacttgaacccaggaggcggaggttgcagtgaatcaagatggcaccattgcactctagcctgggcaacagagcaagactccgtctcaaaaaacaaaaaacaaaacaaaaaacacagagatggggggctggctat[141 bp omitted]ggctggagcgcagtggcacgatcttggctcactgcaacctctgcctcctgggctcaagcgattctcctgcctcagcctcccaagtagctgggattacaggtgtgcaccaccaagcctggcttttgtattttcagtagagttggcgggtttcaccatgttggccaggctggtctcgaacccctgacctcgtgatccgcccacctcggcctcccaagtgctgggatcacaggtgtgagccaccacatctggcccgtattattattatttttttttgagacagagtctcactcttgcccagagctggagtgcagtgatctcagctcaccgcaacctccacctcccaggttcaagcaattctcctgcctcagcctcccacagtgctgggattagacgtgagccatcgtgcccggcctccccttgtaatttcttggcaaagtcgggttttctgccccgtagtgtctctgaacttttggatctgcccagtggtgtcccctgggggtgcctggcctgctccccagcccctggtgtcccctgtgaaacggtagtaaagcgtagacgccatgctgtcaggtgagccgactgctgccggcggctcttccaatgtaaacgctgcacagctgagccgtcaaagccttttcatcatacggaaacttccatcagatgctgctgacccacaggcacgatgggattcaagtttgggtttttggtggtgctggaatcccgtggggaggccgtggctggtgtgacctcagcagccagacccacctactcattaggggtctgcaccaggttgccctggcagctgtggggagaacagaccacgggtggtgcagggaggaccccgcagaggggcctgggctggtcgaggatgttgatggggaaggaggctgggttcgacgctgggccccaacctgggtaggagctgtggaggggtgagcagtgggcagttccctgtgttgcaggtggcgccccccagggttttcgggagaaacagggtgtcagaggcagtgacgacagagctgcctccgcctggggtgggaagagcgagtgggggcagatcaggagtggggtcatggacatgttagagtggggctcccgtgggacccccaggggagaggcagaggaggtggtgggataggcgtccagcccagggcgaggtccaggtggagatggacttgccggcgtttagaacagagggtctccacccggggtgatcctgccccccgccccaggggaccctggacagtgtgtgtctagagacagctgtggtggtcacgcctggggtgtgctctgggcatggagtgggtggaggccaggaatgcagcctcggcgccctgcagtgcccaggacggccccaccccggagaacggcgcgcccctcaatggtcaggggtcctgaggggcaggcagaggcgctgacggggtcccccgcgcagctgcaccacccggcgcagggcttccgcttcggcaccgtgtgggagagcagcgccgaggcgtacatcaagaagagcttccccgacatgcacgcacacatgcggcgccacagcgcgcccaccacgccccgcggcgtcgccatgctcacgtgagcccgggcgcggggtgaggcgggggcggggcgtggggtgggcggggcgatggctgacccccgcccccggccccagcaggagcgacccccccaagctcaacgccttcatcatggacaagtcgctcctggactacgaggtctccatcgacgccgactgcaaactgctgaccgtgggaaagcccttcgccattgagggtgagaggcacctgggcgaggcggggcgccggggtctctggggacctcctgggggcagtggggagccacggagggttcgaggtgggaaggggcgaaatcccacgtgtgcgggcagagttcccctggggctgtcccacctggccccaccgcctggccccgcgcccccaggctatgggatcggactgccccagaactcgccgctcacctccaacctgtccgagttcatcagccgctacaagtcctccggcttcatcgacctgctccacgacaagtggtacaagatggtgccttgcggcaagcgggtctttgcggttacagaggtggggcagggcctgggacagagggtgggggtgggggtgggcgtggggggccctgagccttgtctgaagtgaccaaccccagtgctcattccccagacgtgcgtttgtctgcttctgcgcacttctattcaccctacaaaaccccggctgcagtgccccttcctccatgaaacctcactccccccagccatggagtccctgcctcccaacctggctccactgccccaagcccctctctctggcccaacctgttctcccctagttcaaggctccccaggggcctgccattacgtgaccgtgcggggctcctgctgtgttgcccccagaccctgcagatgagcatctaccacttcgcgggcctcttcgtgttgctgtgcctgggcctgggcagcgctctgctcagctcgctgggcgagcacgccttcttccgcctggcgctgccgcgcatccgcaaggggagcaggctgcagtactggctgcacaccagccaggtggggagcgggtgggcggcgggcggccccaccccccccgcctcctcgccaaccgggtctgtctggggtcttagaaaatccaccgcgccctcaacacggagccaccagaggggtcgaaggaggagacggcagaggcggagcccaggtaagtggtggtcggggcggaccacgatgcaggaccacccagacccaccaccccaccagctcgccccgaagccggccgcggggtgcaggaggttcccggaggtcccccgcccacccccggacgtgcacaccgtggctccctggttgtgcctgtcggccatcctctgccgtcagcggcctctgcagaggcccagggcgcgagacggctgccccggcggacactgaccaggccggttccgtccccagcggccccgaggtggagcagcagcagcagcagcaggaccagccaacggctccggagggctggaaacgggcgcgccgggccgtggacaaggagcgccgcgtgcgcttcctgctggagcccgccgtggttgtggcacccgaagcggacgcggaggcggaggctgcgccgcgagagggccccgtctggctgtgctcctacggccgcccgcccgccgcaaggcccacgggggccccccagcccggggagctgcaggagctggagcgccgcatcgaagtcgcgcgtgagcggctccgccaggccctggtgcggcgcggccagctcctggcacagctcggggacagcgcacgtcaccggcctcggcgcttgcttcaggccagagcggcccccgcggaggccccaccacactctggccgaccggggagccaggaatgaggcggcagccgggccgtttgggctcaagacacacacacagcgcagtgagccgctgtcaacagacagtttattctatatacaaacacaattttgtacactgcaattaaatagaatggaatgagcgctcctccgcattcctccccgagtgactggtttggccgccggcccactccatccccgagtgggactggaccacggccctggctgctgccactgatgttggcgcctgcaccccacgtccctatgcccgaggcgcaagctctgctctcccggggaccccaagcctggcgcacacgcggggagggcggggccatggagaaggcactgcagggagcaccaggcagagccgggctgaggccggccggcactagggcgcgaggccccaccccaagccggcctctcctccacacctccgccttgctcagagacctgcaccatgggaccccactccatcctcaggacggttcactgcagacctaccaagacccctccagaaccttccgcggaaccccaccccctctccttgctgaccagctcaaacacctcactagcgggtacaagcctcgggcgcgacctcacaccagggggaggaaagccgccttccgggcaaaccccacgaaaccctgaaagcccccgacacaggctgggcagtcccagaggaaggaggtggctggcctcccccacccccacgggctcgggaaggtcaggcccagccagcaggggtcagaggcggctcagctgtgcggctcaggaccccacctccgagggcgcctccgttggggccatggaggccgggctaggcccgcctaccgcagcccccaggggagttgtgtcagaagctgcggagtcactcggggggacactgtcctggggggcgtgggggaggcccccagcagggcccagcgggctggctggacgccgctccaggagggaggcgctcaggccggacaggaaggaggcgtctgtgatgatggcagcggtctctgccatccaacccaggtcaccaccggcagctgctgccactgaggctgccgcggccaccagggagctgggcgccgctgccacaggcccgggactcccgctggccccaggcgagacggggcccagggcggggggctggccggcagagtcaggggctgtagccggggcgcccgagttgttgttcatgtcatcgggcagcgccgtgggggtcccggggcccagtggcggcgcctgaagcagcatctcctggatgcggacctgctgcaggatggcaggcagctcgtagtggtggaagaagtagatcatggaatgctgcgggagggagagtgggagtcaggacgggcccgcccctgccccacccagccgctgctcccagagggcagcccacccgggaccatccacgctacctctgcccgcttgggccgaccccacagggcatcctccccggctgcagcctctcctgcctggaaaggcacggctggcctgccccctgcttgccgcccaggcctcacctggatgaagagccaggaggtgaccagggccaggctgctatactgcccattgaagcggtagtgataggcatagaaggcgaagtggtagagatagaagaacctgcggggcggggtgagggcgtcggggctgcaggtcccaccctgccaggcccagcccctggggttcccgcgtggcgcagccaccacccccgcctccagcgcccctccctctggcagccccctacccctgcccaccagcacccactccaccctgcccccgcgccacgctcaccgcagccaatgccgcttgctggtgctggtgtggcagcagatggcgtcatactggtccgcgagccacacgatgaggatgatgtagaaggcggtggtggtgtcgttgaagaactccgacatgatggcctccatccctgcagggagaggcggcgccggttgaagcgggcggggcggggtgcagcgcggggcgggggaggccgggtggggtcctcaccgacgagggccaggatgacggtcagcaggggcgctgcggggaaggcgatggccatgttcatctccagcatctgcagcaggtccactgcgggcacagggcggcgggcgcccggtgagggcctggaggacgcccgccccgccctgcgccggcgggacactcaccgatgaagacgaagatctggtggtgtgagtaccgcagcagcatggacacgctcagcgtctgcaaggggcgcgcaggaagcgctatgaggggctgcgagggcctgcttggctcccgcccggccagcccccgcacccgccccgaggcactcacgaagatgaccatgatggcgaaggcggccaggtaggacgtccgcgccatccacatgctcacaaagcggtagtgctcgcccgacaccacattccgcaggaagcctgcagcagaaggagccgtgagcgcccgcccccacccgcgccctcgcaccctcggccccggggcatgcctcacccttgttctcctcgttctcggccaggcccttcacgctggacatgaggatgtcatcgtagcccaggaactcatccagcagcaggcggctgaagcggtccccgaagcactggtcccgcgtggggtctgcgggtgggtgaatcagggagccgggagccccgcccaggccaccccctgggccctgccccagctggctccattgctgaggcctggcctgcttcctggccctgcccattcttaggaaacccatccaggaccccagccctgggaagcgtgcctggggcggggcagaccccagtgcttcctgcacagccccccgtcccgcaccagcaggaggagacccgagggaggaggggaggccccgccatggagctccccaagcccagcagctcagactcacccagggtgaccaccatgacggggatgctcaggcgctggcgggtggcctgcgacaggcgaaggaagccatactctagtgagtactccacgatgtactcgtcctgcggccacactgcagggcagaaccagggaccaggtcagcgcccccacacacgtcccccgcccactgccagcaggcaaggcaggcgttgaggggtggagggtgagacctgctgagccctgggccccaggtgggtgctgggaggacccctacatggacacttgggatggtgcccactcaagctggtgtcctgccctgtgcactgcagaggctggccaggctcctcctcccgtggccccctctccctggctggggctggctgggtgcagggctgccccactgccctggcggcccccagcacacccccaacacttcagaggccccggccctctggatagaccctctgctgccagatgggcaggggtgggggcgggggcgggggcttccctgagcacagcccgctagaactctgagctcagagccgaagggatccatcccctccaagtcgccgttcacgaggatcccagaaaggatgagctgagccagttaccccaggctctggggtgtccccacagcctcctgtgctgacagatggggaaatcgaggcacgggggtgccctcaacggtccaggacatgcagccagcaggctggggatgttcggagggaccccgcctgcaccccagcaccccatgactgaggcaaccccgtgaggcagtacacctttggtgggtggcctacctttggtgggcgtctcggggaaggggaactcctggctgtcattcagggcctctgtgctactcggcggcttgaacaccttgggctcgatgtccagctcaaactgtgggcgaccagggacctgggtgtcagcagcgccagcccgggctgtgagggcccagcctgaggatacagtcctgctaatgggaagggactggaagcctcagcctctgccccaccactgaccaggccagggtggactacgtgtgcctcccgcctcagctgggaccccacctcaacaccaagcctgccctgctgtgaggccatctccagcacagctctgaatcctgaagctgaggcaagggccagctacaggcagtagaccccatggaagggtccatgatgctctgcccaaacactcaaactcttggggttggctctgtgggaacaggtgggaccccaaaccctgactgctgaagcaaaaacatctcccaccaggctgtggggcccaacacagccacctggtcccaccagtgcccaaggccaccacaagctgaccgggaacccagcacctctgcaggcagtggggccacctcaggacggccaggatgggcccagagctcttagctttcagcccccaggcctcctcagctattgctgcccactgcatccccagccccagccaatcccctccccggaacagctactctcaaaggcccgagtctgcccagcccaagtcctccccgagatccccctgccctgcccaggcctctagcagggcgacaggccgagggtcttgcttcagagcccccaggccaccaaaaggccacggcaggcaggggcggccttgtctgcatgccaggtccctgaaagtcaagaaccccaacatcctgtcgatgtcaggaaccgccccttcagcgaccagcatctacggggcgctggcctctgctgcagctgagcccaggcctggctcaccttgatggagctgttcccaaacatctccatggtcagctcttcctcctcctcatcttccatgtccaggttgctgcctggttccacggccaggcccgggaagctcccgcggccgccgctgtcacagaactgtaggaagacgggcgcgcggctcgagttgtgccgcacttccacacgcaggatgccctcacgcggccacttgtcacgcacatgctccaggcagttgatgggcgagcgggagaagacgatgtggatgtaggccaggacgaagagcacaaacagggcctagggggcggccggcagtcagtggggcgccccagggccagctgcagccgacacccaagggcctacgtgatggggcgtgatggggcgcgctgggacgcccaggacggggaaaggaaggaaaccccagaagccgaattgggctctgaggaccctgggtccctcccacgctgactgcaccgggccagcccctcacatagtccaagtgactgaggatccgggggacgccccactccaaccccggaggggctctgccacctgcagcccggctctgacaggccctggggcttcggcaaggcctgtgactgccccgcacctcctcaggggtgagccggacgaagccagcaggccggggccctctcagatgcacacaggaccccccaaacctgggaggagacgaggctggactcagacccaccaagtggagcacaccagggccctctgccagccaacggctcccgccctgcaagcagcagcatgggtgttgccgccaccccagggccaccagctggacccactgtctacgaaagagggcacagccctccacagcccaacctgctgcttcctgcctcaccttccgctgcgtccccagcactcccctgatctcaccacctgaaaatagcttctctcacctggcggggcgccctgtgcaaccctcccaggcctggcggggccagccgcagctgctggggacacagtggacctccgtggctgggcagagcgccccacggcagggcgaggctgccgtgcccgaggcacaacctatgaactggggtgccagcagctctcacctgggggctcctgcccaggggatgcttgggacatctgtggttgtcacaattgggggagctcctggcatggagtgggtgaggccagggatgctgctcggcaccccgcagtgcccaggacggccccaccccgacgtccacagggcttggggagcccacgccccagcgtgctgcaggcacaactcagagtggggcccctctaggggcagttcagggcagcccctcttccagggagcccgcctcaccgtctggcggtttggctgcccactgtacctcccaacctgaggtccaggcatcacccccgagcctggtgagggtcacgtctacctgctgccccgatccgcaaaactgaggacccagctgggccaagggggcgcccacggccacatggaaccccagactctcagggaagaattgatcagactcaaaatcacaagccagagagcctggagcacagggcccctccgtgacccgtgacctgctggcaggtgcaccaatgcccggggtgcagtgagccacctgtggccgcacagccataggcaagaccaccaggagcctcaactcttccacgcccacagtgagctggggcctcctctccagaaccctctgtagactgagcaaagggccgagtcagcaaagcaacccacttccagcccggccgcagtgctgtgacctgtgggaggccctgagtctgagcacggataaagccctgggtctagccgcacgtgcacctggggcgagccccatcacactccccagccccaggagctggagaatcccttgggctgatctgaactgcatttctagtccttacagccaaaagagccgcaggggatgaaggctggcccggcgctgagatttaagcagaaacaggcaagagcagaaccctgaccgccaggcattcaggccccgcccacagacgccggagctacaaatgaggggtgggcggggggagggggcagggccctctgctggggagggttcccctgtgtcctggggaagacagggagggcagtgtggaaggggggcagccccggagcctgagatgctttcaaagcctagcgtttccccatatggcatctggggacaggagccacggaggctgggcccagtggtgggtcacggtcagagacactgaccccacagcccctcggctcagcactctcaggagagaggggcccgcgaggcccatggtggatgctgctggtggccacgctctgccttccaggcccacacatccagcaggagctgtgcccaggacagcaatggaccctgtgccaagatgttccaaaaagtgctgatacacagtgggccgaggtcggggctgtccaacgcttcacaagggacgcacggctgttaccatccctggtttatatacgaggaactgacacagaggtcccgacagacctggacctgctgaggtcacatggccaggagggaggggccagggcagtgccagtctgcacaattaaggccccacggggaagagcagctcctggggttgccctgggcagggtcagcttggtccagggtcagcgggagagggcacaggacacacatcctgccacacccagcactggtgtgagtgacccgtcccatgaagacagcggacgtgatgagagggcaccagtgttttcacacaatgtgcacacactccagtcaaagacttcaagtccaccagacgctatgactcagacgtcactgtgtctctgccccatcaggtgctccgtgctgaccgagctcagggcccctcttccctgactgagcatgaccagaaaaatgccccactggacaaggcccgttgccgccaaagcctcagctccccttcagtctcccaccacaaaacaaggagcaggcaccacccagccagacgcaggctcatcccgagtcccgggtcctcctccccaagacctgtctgtcatcagccaccctgcagcagccacctcaccaggcccggccctgagccacacgcccaggcagcctcgtccacgcccacagtaaccctccccagggagctcacctgcaaatgctcccatgggcccctggccaccctctgcccgcaacctggctcagccactcgcatgccctgggtggtccagtcccctacactccatgaccctgtccctgacccaggctccccagcaggcacccacatgctccagccccacggccttcccacacgctctccagctgcctggacaccccaccccatcccactggctgtggctcacctccaggaggccctgcccacccagcacaggagtcaccccacccctatgacccttccttcctccgggtcagcccacacacggctgcacccacaggagcacctcccccagcctggggccgtgctcaccgcctcctccaggaagcttcctggatgttctggccgaggctctcagggcaccccaacactcggccactgggtgggcctttcctttcctgtctccccacagacctggagtgccaggagcagcctgcccgctctctgggtatttgactgacccacagaccgacggacacacaagcccgcggagccacactctcctcccaggtgggacacagagccctcagccccagccaggaaacactacctggggctcccctttgtccacccggggtgcttcctgcctccaggccaccggggcctctccttccactgcagcctcacagtggcctcaatgtgacaggtcccccattcagagcagggcccctggggtctcacataccccgtctttaatcgtcacgaccccacaagaggagccccattactccctgtggctaggcgcgggcccctgcccatgtccaggggtgctgagtcgagaccccttcaccctgtgggcatccacttggtggtcacctgggtccagagcccaaccgcacaggtgcaggcacccagtgccccaagatggacagtctctgccacactgggctcagggccatgaaggccagcagaggtggatactgaggctggatggaggtctcccgagggcccctggaacacaggcccctgccgcctcctctctccccagcacctggcactgcctggcatttcctaaagccacccaggcatggatgagggaccggggggctccatgctggctcagagctgggagatcctggcatttcctaaagccacccaggcatgggtgagagctgggggactccatgccagctcagggctgggagctcagctgcacagatgccacaggatgaagccaccttgaagggatcataccagggaggacctggctctctgcagggagacccccggaagccaggcaggcaggaagcagaggagccttctggaactcaaggcagcctctgaaatcaggcagttccagcctgcactttgcagataagtaaaagtgaaggcagcagggtcagattctgtgccaccagattaccgggtggaaaattcacaaagaacagatttccccacccaggccaggcatggtggctcacgcctgtaatcccagccttttgggaggccgaggcgggcagatcacctgaaatcagcagtttgagaccagcctagccaacatggcaaaacccagtctctactaaaaagacaaaaaaattagccggttgtgatggtgggcaccggtaatcctagctactccgcaggctgaggcagaagaattgcttgaacccaggaggtggagtttgcagtgagccgagatcaaaccactgcactccagcctgggtgacagagcaagactccatctcaaaaaaaaaaaaaaaaaaattcaccacccagagatctcacagtccaaagccctctgctgagagaggagggattggggttactgagaacctcccaagagtctccaccctacacagaagacggggaactccagctctggcccagccccatctgaccacctgtgagtggtattggcctggagatggagccgggtaggcttgatccctttccaaaccgggacatggtgggaccagggcccaggcgacagggatgcacctcccaaggaggctgagctccgtcgggggaacctggcctggcacccagcacacaccctccacaagcctaaggacacagtggctccatcctgttcccaggctactccatggaaggaaaacccacgtccacagaccagcctccgtccacagtttcaggccccgtctgtggaccccagagccgggaaaggccgcctgcctgcgtaacccttcacagccctgctcaggtgcctactgaggcgaccatgccactctggggggctgcagggaggaaggtgggaaggatgatgggctgagctctggcctggggaggcacggatctggaggctggggggccttccgtgaagtggcagcaggctgggacccacacccaggtccgcaggacggccaaggtccagctccacttgccgagcccaaaaaagcagccagctcctgaccaacctgtgtcaggctgggaacttgcccacgatcgcagcctggcccgccagcatcggacccctctttgcaggctagatccaaaaagctcacggcgcaacttcagcagcccccaagccccggcgcggcggtgttctgatgcagaacgaaaacggccacgtccccatttcgccaggtggcccaggaccccggccagcttgttttctgaggggctgcagctgctactgagcccctcttgtcacccaagcaagactccttctcagagggagtcaggccgatgcctgtcctgcacggctgagacctctgccatctgaggagggcgggagggggacagagcccaagacgcggaggccggtgcctcataggggaggcacgggcgacagacccacaacctgagctcctgaagcaggaagggagtggggacccagcggaggaagaggccggggatggggtggtacgctgctgccggtgactttgccgctaaccctagcgaggtgacctcagctaagtcacattcccctgaggctcaggagcggggaacgcagctgaaaggctacaaggagggagagaggggagtggggagtcgacttccaggacaggggttggtccgagggagacctgcgtcaggctgggttctgggccagcacattgggaggggagagaggcctcggaactgagggtctcaggcggcacagtcaggggtcaaagggcgggaggtgctacctcgcaggccaggaccggactccaagcctgggtaggtggggacctgggaaaggcggtcgccggggacaggatgggccctggagggagctgacagtgaggtttccagagtagagaacagcggcttctagtgcagcgggatccggccttcccgggtggacgtccccgggcgggatggggtcacgagacggtgtccctggccaatcccagggtcagaggtcgcgagggagagccctaatcggtagggccgggtataggcctcagggtgcagggtggcgctcgctgtccccagcggggccaggggtcgcggtcggaggtagcagacttgggggtcgggacagccgctggggtcaagggtcgggggtcggggccgcggtcaccttgagcagcacgaagaactcgaagagacggcggaaggcgggcgggaagagccgcgaataggtgacagccatcttgaagaacagcgcgtggaagagccggtcgcgcacgttgatgagggggttggggttgagattgggggtgcgaggcccgcgcgcgggggccgggccgccgccgccgccgttgggcccgggccccggagctgcgggctccacgtgctccgacatgcctcccagcgtcgcgccctaacgacccgcaagtgtccgagggcgcctcccggccgccatcggccgccctcgcagccgccgctctcctcacggcctcccggccgccgccgccatcttccgctttctcgtccggctgcggcgctgctgacgctagcgagtcgccacgccgggcaagagcggcccccctgcgcccgcagagaacgctgggatgccagcggcgcccgcggaggcctcaccccctacctcggccgctccagggggcgggcctgcatctgggccacctcttttgcatattggcacccacaatccaccgcggctatgaggccagtataaggcggtaaaattacgataagatatgggattttacgtgatcgaagacatcaaagtaagcgtaagcacgaaagttgttctgcaacataccactgtaggaaattatgctaaatatgaaaccgaccataagttatcctaaccaaaagatgatttgattgaagggcttaaaataggtgtgacagtaacccttgagtcgtgctcgcttcggcagcacatatactaaaattggaacgatacagagaagattagcatggcccctgcgcaaggatgacacgcaaattcgtgaagcgttccatatttttgctgtagtctacagctcgtcacctcgtttggcttctcttgcccggatcctgccatgacgtcacagggccagtaacgtcatagtcttcccgtgtccatctcctgtggcgccactaaggttggcggtagaacaatctggcagtctctactcctgcgtggcgctgtgccacctgcccccgtagcttcgcgcagcaatgaataaataagtgctcttcaggggcacttactgagtgccggctgcgtacacaagaggatactatggtttttgggttttttggttgtttgtttgagatggattctcgctctgtcgcccaggctggagcgcagaagcgcgatctcggctctctgcaacccccgcctcccgggttcaagccattctcctgcctcagcctcccaagtagctgggattacaggcatgcgccaccactccaggctaattttatatttttagtagagacggtttctccatgttggtcaggctggtctcgaactcctaactttaggtgatttgcccgcctaggcctcccaaagtgctgggattacaggtgtgacccaccaagcccgccaaaaaaaagttttgtgttgttttttttttttgagacgcagtctcactctgtcgcccaggctggagtgcagtggcgtgatctcggctcactgcaacctccgcctcttgggttcaagcaattctctgcctcagcctcctgaatagctgggattgcaggcttccgccaccacacccggctattttttttgtatttttagtggagaccaggtttgatcatcttggccaggttggtattgaactcctgacctcgtgatccacccgcgtcagcctcccaaagtgctggagttacaggcatgagccaccgcgcccggcccccccaaaaaaatgtttttaaaagttaactgaggacgttggtgcatgcctgtaattccagctacttgggaggctgaggtgggaggactgcttgagcccaggagttggaggctgcagtgagccatgatcgtatccctgcgctccaggttggatgactaagtgagaccctgtctctaaaaaataaagtgtaaaaaagccaacagtcagtatttttagcttttttgggtagagtaactactccactctgctgttgtacagaaaacgcagccgtaaatgatacataaatggatgggcacagctgtgtgccaataaagctttgtctgcagacactggaatttgaatgttatgtaatttccacgtttgatagaatggttttcatattttgggtttttttttcaaccacttaaaaatgtaagagccattcttagctcacaagccatacaaaaataggctgcagctggatttggcccacaggtcaagaacacagctttccaagagaaagataagcaaataacaaacataactttaagtgttctggtagccacagtaaaacaactaaaaaagagcaagtgaaattaattttaataatatattttacacatctcaagttatccaaacaaggtcaggcgcggtggctcatgcctgtaatctcagcacttttggaggctgaggcgggaggatcatttcagcccaggtgttcaagaccagcctgggcaatataatgagatcctgtctctacgaaaaataccaaaaattagctgggcacggtggtgtgtgcctgtggtcccagctacttgggaggctgaggcaagaggattgcttaagccaaggagttggaggctgcagtgagctgtgatggcaccattgcactccagcctgggcaacagagcaagaccccacctcataaacgaaaaaaaagtggccgggcgcggtggctgacacctgtaatcccagcacttgggaggccgaggcgggcggatcacgaggtcaggagatcgagaccaccctggcaaacacggtgaaaccctgtctctactaaaaatacaaaaatattagctgggtgtggtggcgggcgcctgtagtcccagctgctcgggaggctgaggcagaagaatggcctgaacccgggaggcggagcttgcagtgagccgagatcacgccactgcaccccagcctgggtgacagagcgagactacttctcaaaaaaaaaaaaaaaaaaaaagtaactgagatgtaccaagtcttcagaatctggtgtgtttcccatccatggggtgttccaatatggataccagtgcttcctcagaaatacttatctccacagtatttagatttacagcgtttatactgaaaaggaaaattcagaaacgctaaggtatttaaaatatacacgaggctgagcacggtggctcacgcctgcaatcccagcactttgggaggctgaggcgggaggatcacttgaatccagactgggcaacatagggagaccccatctctacaaaaaatttaaaaattagctaggcatatggcacatgcctgtagtcccagatactcaggaggctgaggcaggagattacttgagtccaggaggtcgaggctgcagtgaactatatttgcaccactgcactccagcctgggtgacagagcaagaccctgtttcaaatatctatatatttacatttatatgtataatgtgtacatatgtgtgtatttatgtatttgaaaactttaatgtgtgtgtacatatatatatagtcaaaaacggaaatcatgtcagtttttaatttttaactgaaattaattgaaatagcccggccacggcagctgacacctataatcccagcacttcggaaggctgaggccggcggatcacttgaggtcaggagttcaagaccagcctggccaacatggtgaaacccgcatctctactaaaaatgcaaaaattagccaggcgtggtggtgcgtgtctacggtcccagctactcggagtcccagctacatatatatgtgtatttatatatatgtgtcttcaaaaaatggaatctagtgccagtttttaatttttaattgaaatttaagaataggaagtatttgctgggt[173 bp omitted]ggcaggagaatggcgtgaacccaggaggtggagcttgcagtgagccaagattgcgccactgcactccagcctgggtgacagagcgagactccgtctcaaaaaataataataaaataaaataaaaagaacatgaagtatttgcttccctgatggcaccagccacacttccagtgctcagtagccccatggccagtggctacagtagtagatagtgccacattgaaaatttccttcatctcagaataacagaaatggtcagcactggtctaaaatgacatgggtcggccaggtgcagtggttcaagcctgtaatcacagtactttgggaggctgaggcgggtggatcacctgaggtcaggggttcgagaccagcctggccaacatggtgaaaccccatctctactaaaaataaaataaaataaaataaaataaaataaaataaaataaaataaaataaaatgtgtcaaactcctattgatgcttcaaaaccccatctcccttgcctcctcttacatgcagctttccttgattcctccgacagagccccaactctccctccagttcctccagccccaagcctctcattctgtcctgtacttgctcatatagggaaacagggtgggcggggtgggggggttccgcctgtgctggctcatacagggaatccgggttgggggttggtctgtgccagctctgtcttcctgggcatgggctgggccagagctaaggtctcctgagagccagcactgcctggcaggagactgtcccggagactttttaataatttattattatta[137 bp omitted]gcctcctcagtagctggaattacaggcatgtgcccccatgcccggctaatttttgtatttttagtagagacggagtttcgccatgttagccaagctggtctggaactcctgacctcaagtgatccgcccgcctcggccttccaaagtgctgggattgcaggcgtgagccactcggatttttatttttatttatttatttatttttagagagaggctcttgctctgctgcccaggctggagcgtcatgttgtgatgataactcactgcagcttcgacctcttgggctcaacggatcctcccccttcggcctcagcctcccaagtagctagaactccaggtgcaagctaccgcacccagtaagaatcctattctcttttggactgacaaactcctactcatccaacaaagccccagctccaatggccccttctctgaggaacctgccctggttccctggtccacctcccagctagtagagttccctgggaaggggttagacgcctctaagtggcagagaggggccctcattcctgccccaaaggtagccttctcccctcccctttctggcagaagagaagtctgagatggagaaagagtgagagccgcccacgagctctgagcagagagcccgcaggagtgccacgtcccggcggcctcggcccctccctgcctcagtttcccgtggcatcaaagggggcgaggggcccctccaggcctctggtgacgggggtgctgtgcccaggcgggggtccgggggcgaccgagggggctcaggaagtccgcggccgcaggaattcggcgcctccaggccttataaggacatttgcgctccgggccaatcagcggcgggggcgtggcgcgcggagcccggcgcgtcccaaccccgcgccagcccggcggtcccgtcccgtcccgtcctgtgcggccccgtcccgccgcccgcccgccagccatgagctccacgcagttcaacaagggcccctcgtacgggctgtcggccgaggtcaagaaccgggtgagtgaggggcgccccttgtccccccgacagcgcggccgtcgcacgctccgaccggtgcaggagcccccaggcgcccccggcacctcccgggcagggagcttggagacccggggcggacgggcccttgttctccctgacgcctggtggggggatgtctgcgggcaccccctgaggctcccgcgaatcttggggagcacccaggtctgagatctgggggacgagtgacccattcccccccccaacatctaggggtagttgggtctgacttcgtcccctcgccatggccccaggacccccacgtgtgaagcccctggcgcccactcaaccttcgagaaggtccgttcaaggtccgacaacgctctgggggtctgggggggaccccagcaaccccgtcatctcctggccacacttctgcttttggggcctcttagctttgggaggggaaggggcatggccgagtggtttttgagaagtgttacccccccacaaacaggaatttcctggcctctgggacaccttgggggtgtcttggggggaggggcggtagccgctttgcacggtctttgtctcccatctgactaatttaaacggataacaaagaggttctctgaaggtggccctgagatatgtggggttttgcagcctcgaaagaagagctggggcccggcagggcgcgggggctcacgcccgtaatcccagcactttggggggcggagctgggtggatggcttgagcccagcgagttcgagaccagtctgggcaacatggcgaaaccccatctctataattaaaaacaagccagggctaggggagacactttttaagagagcacttgtggttctagctcagagaggaccagacacttctgcagggtcacacagcagggtcctggacaggattcccagggaaagtggggggcgggggttgtgatgcgagacccacggacaggaccgggacctgaccctccaggaccttccagctggaggggggtgtcgtccccgcccaccccctcccccgacgcccactgggcacctgggaaggtgtccttacagctgacttctgcaggggaaactgcctctgcacgctctgagggcaccggccctgccagccccaacagccacctgcccggcggcactccagggccggcagactggagggagaattcctgcttccccgctgtgagcccctgcaagccttcagaccagctcttggccaaaaagggaggctgaggcttggggtggtcaaggcctgagccagggtccccagcccggggctcacgactcctccttcaaggggccatctgcaccctgcattcatagagccccccgtgcagtggggtgggcaccctgccgcaccctgcatacagccggctaagggcaccggtgtccacagggacccagagacgtcgttccagctgcccagggccacacagcccacaagtgacagggccaagaccggaacccagtacctgctgggcctgcggaagtgggagcgggcacaggagggtggggcggcttccggagacggggtggggtggggtgggggcaggttgatacctgccctggcgggggtgaggacagaggctggaagagccgcttagcaggctccccgcgcaaccctcagtctgtccgtttggagggtgggcgaggcgtcggccagcttgccagggtcacggaagggtcgcctcccaattagaaaccagcttccccctggcttcccgctcacacccgctttaccggctgcttgaaacagccagagacccgccccccgccccgcttccccgtggctcagttgactcccggctggacggcacggaggcagctcggatccacagtgtctgcggccttgcatcccggcttgggggtccggacccgctgggaacagctggttcagatttagccggggaggcagcgcgcattcctggcagtttgtggtgaacaggaatgtgctggaaggccggcggccgggcagcgggggggcgggggtgggggaggacggcagcggctgggggtggggccaggggacctgggcccctgagccggcagagacgcggcgcagctgggcaaggcagggctgtgtacccagcagccaccgttctcattcctcgggatcaaagttgccggcggggcggggctgcccccgggcgtggaaagccaagctgggtgggctgtgagctggtactggggggcctccccgcctttgcctcctctgggctacgagctgtttccaggcaggtgccaggtcaggggaccctaacccaaataatcccaggcaggtccaggtcaggggaccctatcccaaataatcccaggcaggtccagctcaggggaccctaacccaaatcatcccaggcaggtccagctcaggggaccctaacccaaatcatcccaggcaggtccagctcaggggaccctaacccaaatcatcccaggcaggtccagctcaggggaccctacccaaatcattccaggcagatctagctcaggggaccctaacccaaatcatcccaggcaggtccagctcaggggaccctaacccaaatcatcccaggcaggtccagctcaggggaccctaacccaaatcatcccaggcaggtccaggtcaggggaccctacccaaatcatcccaggcaggtctagctcaggggaccctaacccaaatcatcccaggcaggtccagctcaggggaccctaacccaaatcatcccaggcaggtccagctcaggggaccctaacccaaatcatcctaggcaggtccagctcaggggaccctaacccaaatcatcccaggcaggtccagctcaggggaccctaacccaaatcatcccaggcaggtccaggtcaggggaccctaacccaaataatcccaggaagagatgaggaagcggaggctgagtggggagctgtccgcgggaacctggggagatgggtgcagagcagggagagggatttgattttttttttccttctctcttttctttctttttttttttaagacagaggctcactctgttccaggctggagtgaagtggcccgatcttggctcactgcctcctctgcctcctgggttcaagcgattctcctgcctcagcctcccaagtagctgggactacaggtgcccaccaccacgcccagctcatttttgtattttagtacagacgggatttcaccatgtgggctaggccagtctcgaactcctgacctcagatgatccgcccgccttggcctcccaaagtgctgggattgtaggtgtgagccaccgcacccagcccaaaccctactttattctccctccagcgtttatctcccgctcccgctacacgacctgcccccatgcttatggccccctatacactttgccgtctgcctcagtgctgtctccgcggtcactagtggctggatagggacactcgaggtccccactggtgcacacccactgcccaggagcacacagcccattccccacggcggtgtctcagagcaccgaaggccaagaaagctggaatggccgggtgcagaaaggtggcagggaatcggtggcaaggagccaggtgcgtgactagaggcggtcagcctcgggggcagctccttcgggagttgctaagaagcaggatgggggccgggcgcggtggctcacacctgtaatcccagcactttggagggctgagacgggcagatcacgaggtcaggagatggagaccatcttggctaacacggtgaaaccccgtctctattaaaaatacaaaaaatgagctgggcctggtggcgggcgcctgcagtcccagctactcgggaggctgaggcaggagaatggcctgaaccggggaggcggagcttgcagtgagccgagatcgcaccactgcactccagcctgggcgacagagtgagactctgtctcaaaaaaaataaaaaagaaaaaagagctgatggttgcacaacattgcagacgtacgaaatgctgtgaaatggtgcggtttcaggtggttgaagtggtaaacgtcaggtgtgatatagcggggaggtgagaaggcagggcggggaggcagatccggccaggtttgtcctgcaccgggagtggattagagctgatgtttatcagtgagttctaagccggttgtcggcctgcttggagggcggtttatctgtgcccgcctgcagtggctggggcgcccccaatgatgggaaaagggagcatctgcgtgggtgtggtgaggggggacctccaggccgctctatctgctgttgccctggagtccccggccccaccctctgcagagcttctgtggggttcctgctgggggtgcccccagcccagctcagtctcgtgccctttgctccaccagctcctgtccaaatatgacccccagaaggaggcagagctccgcacctggatcgagggactcaccggcctctccatcggccccgacttccagaagggcctgaaggatggaactatcttatgcacgtgagtacacgcagggacacaggctgtctcacacttaacaaatcttggtttttctcactttttttcttaattaagaaatttttggggggccgggcatggcctggctcatgcctgtaatcccagcacttttggaggccgagggtggtggcggggggcggtggatctcgaggtcaggagttcgagaccagcctggccaacatggtgaaaccccgtctgtactaataatacaaaaaaattagccaggcacctgtaatcccagctactcaggaggctgaggaaggagaattgcttgaacccgggaggcggaggttgcagtgagccgagatcacaccattgcactccagccggggtgacacagcgagactccatctcaaaaaaaaaaaaaaaaaaaaaaaaaagttagctgggcgtggtggctaaataaataattttttttttttgaggtggagtctcactctgttgcccaagctggagtgcagtggcatgatctcggctcactgcaacctccacctcctgggttcaagtgattcccctgcctcagcctcccgagtagctgggattacaggcgactgccaccatgcccggctaattttttttgtatatttagtagagatggggttgctccatgttggccaggctggtcttgagcccttgacgtcacgtgatctgcctgcctcggccttccaaagtgctgggcttacaggcctgagccaccaaacccagccaaagattactttataagagtggaaacttgaggcctgggatggtggctcacgcttgtaatcccagcactttgggaggttgaggtggacggatcacgaggtcaggagatcgagaccagcctggacaacatggtgaaactccatctctactaaaaatgcaaaaattagccgggtgtggtggcaggcacctgtaatcccagctactcgggaggctcagggctgaggcaggagaatcacttgaacccgggaggtggaggtggcagtgagtctagatagtgccattgcactctagtctgggtgacagagctagacgccgtctcaaaaaaaaaaaaaaaaagagtggaaactgaggcccagagagaggccgtgagtttgcccaggaaggcgtgagcttggctgagatcagcatcgggtcttcacggttcctcgctgctcacagaggtttctgtttcccccgccccatgttgtgccctccagactcatgaacaagctacagccgggctccgtccccaagatcaaccgctccatgcagaactggcaccaggtgaggggctggtggagcggagcagggatggtgctgggggcccatctaacaggtggggagactgaggcccactcactgtccctctcctgcctcttcccagctagaaaacctgtccaacttcatcaaggccatggtcagctacggcatgaaccctgtggacctgttcgaggccaacgacctgtttgagagtgggaacatgacgcaggtgcaggtgtctcttctcgccctggcggggaaggtgaggcccagagaggggcagccacctgcccagagtcacacagcgaggtggatgtagctgctgcattcactcgtttgcaaatttctgtttgtttatttttgagtcggagtctcactctgtcactcaggctggagtgcaatggcgtgatctcagctcactgcaacctccaactcccaggttcaagcgattcttctgcctcagtctcccgagtagctgggattacaggcacctgccaccacgcctggctaatttttgtatttttagtggagactgggtttcaccatgctggccaggctggtcttgaactcttgacttcaggtgatccgcccgcctcggcctccccaagtgctgggattacaggcatgagcccctgtgcccggcctcgtttacaaatatttctgagcatccgtgaggtgccaggtacttcagattccttggtgaacaggaaggacatggtctaccccttatgcagttcagtctgatggcggaggcatgcaaaagtgaacacag[131 bp omitted]tgaaaccccatctctactaagaaaacaaaaattacctgggcgtggtggtgcatgcctgtaatcccagctactcgggaggctgagcccaggagttaagaggttgcagtgagctatgaccacaccactgctctccagcctgggcaacagagcaagactctctcaaaaaataatcataacaaaagtaataaataagctctgaactgggagaaatgccttgaaggagaagaatcagacgaatgttgagtgtctagtgatcttcaaacccagaccgggagcgtgggtgggacagtggtgtagaccgggagcgtgggtgggacagtgtctggtgtagaccgggagcgtgggtgggacacggtgtctggtgtagaccgggagcgtgggtgggacacggtgtctggtgtagacggggagcgtgggtgggacggtgtctggtgtagaccgggagcgtgggtgggacacggtgtctggtgtagacggggagcgtgggtgggacggtgtctggtgtagaccggcagcgtgggtgggacacggtgtctggtgtagaccgggagcgtgggtgggacggtgtctggtgtagaccgggagcgtgggtgggacacggtgtctggtgtagacggggagcgtgggtgggacggtgtctggtgtagaccggcagcgtgggtgggacacggtgtctggtgtagacggggagcgtgggtgggacggtgtctggtgtagaccgggagcgtgggtgggacacggtgtctggtgtagaccgggagcgtgggtgggacggtgtctggtgtagaccgggagcgtgggtgggacacattgtctggtgtagaccgggagcgtgggtgggacggtgtctggtgtagaccgggagcgtgggtgggacacggtgtctggtgtagacggtaagcgtgggtgggacacggtgtctggtgtagaccgggagcgtgggtgggacggtgtctggtgtagaccgggagcgtgggtgggacacggtgtctggtgtagaccgggagcgtgggtgggacacggtgtctggtgtagaccgggagcgtgggtgggacggtgtctggtgtagaccgggagcgtgggtgggacacggtgtctggtgtagacggggagcgtgggtgggacggtgtctggtgtagaccggcagcgtgggtgggacacggtgtctggtgtagaccgggagcgtgggtgggacggtgtctggtgtagaccggcagcgtgggtgggacacggtgtctggtgtagacggggagcgtgggtgggacggtgtctggtgtagaccggcagcgtgggtgggacacggtgtctggtgtagacggggagcgtgggtgggacggtgtctggtgtagaccgggagcgtgggtgggacacggtgtctggtgtagaccgggagcgtgggtgggacggtgtctggtgtagaccgggagcgtgggtgggacacattgtctggtgtagaccgggagcgtgggtgggacggtgtctggtgtagaccgggagcatgggtgggacacggtgtctggtgtagacggtaagcgtgggtgggacacggtgtctggtgtagaccgggagcgtgggtgggacggtgtctggtgtagaccgggagcgtgggtgggacacggtgtctggtgtagaccgggagcgtgggtgggacggtgtctggtgtagaccgggagcgtgggtgggacacggtgtctggtgtagaccgggagcgtgggtgggacggtgtctggtgtataccgggagcgtgggtgggacacggtgtctggtgtagacggggagcgtgggtgggacacggtgtctggtgtagacggggagcgtgggtgggacggtgtctggtgtagacggggagcgtgggtgggacacggtgtctggtgtagaccgggagcgtgggtgggacacggtgtctggtgtagaatggaatgggagtgtgtgtttgtgacatggtgtctcacgtagaaggaacagcaaggtcttgacattggaattggctgggctgttagaggaagcgggagctggttttctcctggggtaactgctccaaatggtgttttcagatgccccctgtggctcccagtaacctcacgtggggaatggtggtcagggaggagccgggcgcagacatcccagtgaggggcagagccaatggcctggccatggtgcccggggattgggtcagaggaggtggtggaaggtgagagagaggaagcgaaaaccacgtccccatccccagaattcttggcctgagccctggaaagctgagc[224 bp omitted]gaggcaggagaattgcttgaacctgggaggagggggttgcagtgagcggagatcacaccactgcactccagcctgggtgacagagccagactccatctcaaaaataaaaataaaaaactgaaacagctgtatgatgggtgtgtggagtgtgtggagtcccagacacccgagagatgtgcctgtgggggctctgcgcggcaggcagaggtgacaggccgcggcctggtctctgtcccgcccccagggcctagatctagggtccctggctgccctctgctggtactcccggcccctttccctcacccaggccaagactaaggggctgcagagcggggtggacattggcgtcaagtactcggagaagcaggagcggaatttcgacgatgccaccatgaaggctggccagtgcgtcatcgggctgcaggtgggcgacagctcccccagccccagggaccacggcattgggggaccacggtgttgggggacagcagcattgggggacagcggcatggagccctgtggtccctcaatttcagggagggaccggaagcttgttgggtgcagtctgacctctcccacgaacctccctgcagatgggcaccaacaaatgcgccagccagtcgggcatgactgcctacggcacgagaaggcatctctatgaccccaagaaccatatcctgccccccatggaccactcgaccatcagcctccagatgggcacgaacaagtgtgccagccaggtggggctcgcccgggtgcccccgactcctctccctgcccctctacaccctgtggtctcggcccctccctggggccacctccagcttctctccccactctcagtctcagccccttccctagaccacctccggcttccctccccgctctctgtctccgccttggatttcagcctctgtcatttccacctggctgtgggtctctagggaagttactacctcaccctgtgtcattttcccttaaggactgcccaaaggtccacccaattctttttttttaatctttatttattttatttatgtatttattttgagataggatctcactctgttgtccaggctggagtgcagtggcacgatctcggctcactgcaacctctgcctcccgggttcaagagattctccttcctgcctcagcctcccgagtagctgggactacaggtgcatgctgccacacccggccaatttttgtatttttagtagacatggggtttcaccatgttgcccaggctggtctcgaactcctgagctcaggcaatccacccgccttgacctcccaa[132 bp omitted]ctcagcctcccgagtagctgagactacaggcgcccgccaccacgcccggctaatttttgtatttttagtagatatggggtttcaccgtgttggccaggctggtcttgaacttctgacctcaggtgatcctcccacctcagcctcccgagtagctgggattacaggcatgtgccaccacgcccagctaattttgtatttttgggagagacagggtttcaccgt[136 bp omitted]ctccttcctctccaggtgggcatgacggctcccgggacccggcggcacatctatgataccaagctgggaaccgacaagtgtgacaactcctccatgtccctgcagatgggctacacgcagggcgccaaccagagcggccaggtcttcggcctgggccggcagatatatgaccccaagtactgcccgcaaggcacagtggccgatggggctccctcgggcaccggcgactgcccggacccgggggaggtccctgaatatcccccttactaccaggaggaggccggctactgaggctcccagcacgctctctccccacatcgtctgcccatctgggtttttgggtttttctgtgttttcatcttttttttttttttcttaacccgttcagtgctgccagtcaaccaagggtctgtgagtgtcagcgtgggatcaggcagcagagcttttttcccctttgccttgatccttcgcaaggctgagccactgggctgtgggggaaggggtcaaggccatatcccaatacgtgtagggcgagggtccctgctggcacattcaggctgtgctgggaagaagagacctgggcttggaaggaaccggtccccgacggtttctgcttgcctcgcctcttcccccttttgtcagctgagcagtttgtggtttctatgcccgcaagtttcaggaagtattcacaaaagaaaaatacattttttcccccaggggtggggcaaggacagtggagagagtgctaggaaatgagtcccctgggaaaggggaccgggccgtgatgttaaatatctccggctcccaagtgactggatttgcctaggaccttcagaccaacagacttcagaccctcagacctgccccggggccaggtggagaaagtgagggccgtacaaggaagtgaaattctgagttgttggggctaagcctgaccccctctccatgctccccgccccaacccactctggcctcagtagatttttttttcagttgtggttgttgcccaggctggagtgcagtggcgccatcttggctcactgcacctccaccttccgggctcaagcgattctccagcctcagcctcctgagtagctaggactgcaggtgctccaccacgcccggctaatttttgtatttttagtagagatggggtttccccatgttggccaggctggtctcgaactcctggcctcaggtgtgatccgcccgcctccgcctccccaagcgctgagattacaggtgtgagccaccgtgcccagcccctcagtaggttttaaggagcccccagccctcctcccttctgggcccgaccagcttatactgctccatcttccccggccacatgccccgccaagtactgcacagggaccccccacccaggggacctgctccgtgagataatgtgaaatacgactgtggaccaaacgcaataaaacctctgtttgtacgaagagaaggtggccaagagagttggcgtcgatgagggcgtgctttgctttgatgcttttgtggggagagaggaggtcttgggggatggggggatcaaggggaaaatgtccacctcaccattgggaggaggagcaaaagctgaagccacaggtgagtctgggtggaatgaatgatttgaagggccgggacttggggtagagggagaggctgggcttcctggccatttggagaagaggcagttccctcaaatgccccccatgcgctttggctgcactctaccttacagcgcaagtctcgtggcctcagcctggatgtctccccgttggcgaactcctatttatcctcaaagccccaacggcaatgccacctcctgccgcgggagccgtccccacgcctctcactctccccagcgccttcaaagctgtggacccacacgctcccatttcagcttcacctccagcctgaagagtttatttcaactcttcttccagagtgggaaacgggttttcctcaaaatcagggtagccactataatcggagactctagaatgttggccccctccccctcctgccatcctctgcagaagccgaggagcgttcgtggaatgaatgaatgaacgaatgatctagtggaacccctactttacagacggacgagtgtagtcccagagtctggactaaactagagggagcctggccagccccggggacagcggggacagagggaactcctgcaattcggagctgcggtattgcagccggttatacaacgtggggaggcagcctggctccccaaagacagcgcagcctcgttcccggagggcggcctgcctgggacctgccgggcactccgccaccctacggtgatgcagcaagagccgcgcggtccctttaagaaacccggctaggcgaggcccttctgtgatcccgtctcctcccttggcccgcgcagctccgacggagcaggccagtgagtgacgggcaggtcgcccaatagcagcgtgcagaggcaggggcgtgccccggcgctgctacctgcgcgggcaagctcagcgcacttggcttaaggggcggcgcgctccctgcctgctgctgggcggagggaaggcggcaagagctgcggagcccctggaaggtgagaaggactcggagagggaagaaggcccgagactcgagaatgcggggttggggccgggagggatgcaagttccctgggaattagggggtccagcctctgacctccttccggtgaatgttgacgacggctgaattgatcactgattctcaaggggggcatcggacatctgggacccttaagagggcctttgccgatcacacacctgcagccccctgcccgttagaactcctgcactcccccttgccccgtcttacaaatggagaaactgagcccactcccccagatcctaagtcccgcttgatgtaaaggaaagaaccctggcgtaagggtctgggtctgaggtcccagttccggcctggtcacctttagcaacttcctgcccctctgtcagcgtcagattctccatctgtgtcagaggtggaccggcccaaggaaaatagatcaggaatcgctgactccaggagtctctatcccagccccttcgcctgactctttctctggctcccgcggtccctctgagcgattaatgctacataaggtgtgggcagagctggggtcgtgcctccagctgggcaactgcctgtctctctgggtgcctgggtttgctttcttgggcctcggtttccacttctgtagagtggggtgatagtccagcacttcccctgggcgtgtgaaatgtccagcactgccaatattcgttgctgttatcttcggagaacagtgaggggaaaggaatccttgcctgggctgggccaggcaggaggctgggggtcaggacctggaagaggcttccaggtgaggcttggggtggagcctggtgacgaaagcgttaagcccaaactcggtccctggaggattagaggatgatctttaagtccccagctgtcagccctgctcagagcgacagtcctggcagccaatcagatgcgaggacggctgcgggttgcgctcccattggtttactccacccctggggtagcggagcctctttatcgagtgactactgtttgcctcgctctaatcagagcttccaggaaccctgcgctgtgggataaaggaatgaggttcagaaaggggcagggagttgcccgcagccgcaccgcacgtcttcagcccgaccgttgtcctgacctctctgtcccgtcccctgcccagtctcaccatggccttctggacacagctgatgctgctgctctggaagaatttcatgtatcgccggagacagccggtaacgccccagtgtgagaccagggccgggtgggcaggcagcccccactgtcccccaccgtctcccacctattctcccccaggtccagctcctggtcgaattgctgtggcctctcttcctcttcttcatcctggtggctgttcgccactcccacccgcccctggagcaccatgaatgtgagcccccccagggaccaggcactttgtgtgtgtaggggaaggcagatggctcacccgtgcacaggaatcccccgtgcatgtcagggagccttcaccaggccgccaatacatggcatgggagtgagctctccatcgctggaggcatgcaagcggtgccgggcgacccgatgggggtggagtcaggcagagtccacagggcctcagcaccaggcgtctccccgcaggccacttcccaaacaagccactgccatcggcgggcaccgtgccctggctccagggtctcatctgtaatgtgaacaacacctgctttccgcagctgacaccgggcgaggagcccgggcgcctgagcaacttcaacgactccctgtgagccagaggcagtgggtgcggccggcctgcaaactcggggctgcagtgccggccggaaccccgcctcctgccctctctctgtccccagggtctcccggctgctagccgatgcccgcactgtgctgggaggggccagtgcccacaggacgctggctggcctagggaagctgatcgccacgctgagggctgcacgcagcacgggtgaggaggccggggggcctctggcagggctgagctctgagcctcaacttgccgggccgtgaaatgggcacagggtgggggtgggtgcctcagaccaacgtccccccagccccatgctcccgtgcgctcctcccccagcccagcctcaaccaaccaagcagtctccactggaaccacccatgctggatgtcgcggagctgctgacgtcactgctgcgcacggtagggtgtcggggcgggaccgcgctgacttcctgggacactgcactggggatgtcctggcactgccccaccccgggccaaggacctcccgttccaggcatccaggctgtccctggtctctgcggtgatgctgcttgtccgtctgggcccccagacagagtgtgtctgacccagtgaggaagactcgtctgtgagatctccaatgagtccctttgcctctcagagcctcagtttccctatttgtaaagtgggggctatgatagtatggtctgcctgggaactggccagagcgctggacccctagtgagtgttcaaaatcattgtcccccttgtggtctttctccccaggaatccctggggttggcactgggccaagcccaggagcccttgcacagcttgttggaggccgctgaggacctggcccaggaggtacgaggccccactcatcctcaacccccatggaggcaacgttggcaggcagcctgcgccgggagggtctggggcagcccgggcacttcccttgggtgggttttcaggaggattagacagcgagagggagaggctgcccctggcccagtgccctgccctggttagggcttggaggtgggatcattgccagctccgtctggtaacctctctctagctcctggcgctgcgcagcctggtggagcttcgggcactgctgcagagaccccgagggaccagcggccccctggagttgctgtcagaggccctctgcagtgtcaggggacctagcagcacagtgggcccctccctcaactggtacgaggctagtgacctgatggagctggtggggcaggagccagaatccgccctgccagacagcagcctgagtgagtgactgacctcggtttcccctcttgggaagtggaactctgggcaggggggcagggcctcatggcacccccatcccaggccccgcctgctcggagctgattggagccctggacagccacccgctgtcccgcctgctctggagacgcctgaagcctctgatcctcgggaagctactctttgcaccagatacaccttttacccggaagctcatggcccaggtgggggcagcctggatgctggggtgggagggtggtggccagagcccatccagtaccctcagtccaggtgggccagggccaggccggagggtcacggaaactatttgaagaagtaggagttagccgatggagggggatcagcttgtgcggaggatcagaggcacacgcaggagcaaggcagagggggcagggggtgggcaggggtcctcagaggaggagagggtcatcagtggagggggtgctgtccacaggtgaaccggaccttcgaggagctcaccctgctgagggatgtccgggaggtgtgggagatgctgggaccccggatcttcaccttcatgaacgacagttccaatgtggccatgctgcaggtgtgcgggggtgctggggaggtgggatgtggctccccggtgaggagggtagacaggcccggtggatgggaaggtgggctccgtgcagacccccacttttttttttttttttttgagatggagtctcgctctgtcgcccaagctggaatgcagtggcgtgatctcgactcactgcaacctccacctcccgggttcaagcgattctcctgtctcaccctctgagtagctgggactacaggcgcccaccaccacg[179 bp omitted]gtctcactctgttgcccaggctggactgcagtggcgagatcttggctcactgcaacctccgcctcctggattcaagcaattctcctgcttcagcctcacaagtaactgggattacaggcatgcgccaccactcccggctactttttgtatttttagtagagatgggctttcaccatgttggccaggctggtctcgaactcctgacctcaggtgatccacccgcctcgcctcccaaagtgctgggattacaggcatgagccactgtgcccgacccagactctcactttcacctgcgccccccagcggctcctgcagatgcaggatgaaggaagaaggcagcccagacctggaggccgggaccacatggaggccctgcgatcctttctggaccctgggagcggtggctacagctggcaggacgcacacgctgatgtggggcacctggtgggcacgctgggccgagtgacggaggtgagggcctgtccacctgcggggtctgtttcagtggggagggcaggtcccatcctagtgttcccaccctggtgttcccagggggaggcgggcccggccctagtaagagcctgggatttgtagagatctcaggagggagccggccgtgggcctacgaggggaaaacatggcccagccccgaggtccagggggaggagcggagtggtctaggaggcaggcggaccccagcgcctaggactcacccccgcatcccacagtgcctgtccttggacaagctggaggcggcaccctcagaggcagccctggtgtcgcgggccctgcaactgctcgcggaacatcgattctgggccggcgtcgtcttcttgggacctgaggactcttcagaccccacagagcacccaaccccagacctgggccccggccacgtgcgcatcaaaatccgcatggacattgacgtggtcacgaggaccaataagatcagggacaggtcaggcgagggagggggcggggggatgagggactgggcggggccaagagcgtggtgggtggggccaggcagcattcagcctattggagaccatgatagacaggatctgggctgtatcaacagtggtatggtagccagagcccggggctccttagaccaataggggcccgtgatgggcggggcctaggtgcatgaggggcgtggccatgggcctgagataagatgagagcaggtataggttgagggcaatggtgggcggagccaggtgtattattaggtccctggaataagggtggagctaaaattgcaccgggtgctgagcgcagtagatcttgcctgttatctcagaactttgggaggccaaagtgggagaatctcttgaggacaggtattcgagactagcctgggcaacatagtgagaccgcctcccccccgcccccctccccca[136 bp omitted]cggtgaaaccctgcctctactaaaaaaaaaaagtacaaaaaattagccgggcgtggtagcacgcgcctgtaggcccagctacccaggaggctgaggcaggagaatcgcttgaacccaggaggcggaggttgcagtgagccgagatggcgccactgcactccagcctgggcgatagagcgagactccgtctcaaacaaatgaataaatgaataaaattagccaggcgacttgggaggccgagctggggggatcgtttgatcccgggaggtcaaggctgcagtgagctatgattgcagctcttcactccagcctgggcgacagagcaagaccctgtctaagaaaaaggttattcagggtggggccccgggagtttctagcccttccctacaaccggccaccatgcccctctcgcaggttttgggaccctggcccagccgcggaccccctgaccgacctgcgctacgtgtggggcggcttcgtgtacctgcaagacctggtggagcgtgcagccgtccgcgtgctcagcggcgccaacccccgggccggcctctacctgcagcagatgccctatccgtgctatgtggacgacgtgtgagctctggcacccctccccgctcttccccgcggcgggaaggtcccgggtgtgggggtgggcccaggctctgttgggaaccttcctgcggtccaggctgcgaactttgcacctttacaccactccacgtgacctgctgcagcgggaggagcaggggactctgagggtctggtggggggggggactctgagggtctgggggcccccggcgcagggacagcctgggctgcactgatgcctgagagccaaaggctggctggatcaggttccaaggaacagggaggcaaatcttcccgccttgagatcccgggacacgaaccagtcgtgccagatggtgggcggagggggggtctgcggagggtctccagcctccaccccagccgtccccaccccaggttcctgcgtgtgctgagccggtcgctgccgctcttcctgacgctggcctggatctactccgtgacactgacagtgaaggccgtggtgcgggagaaggagacgcggctgcgggacaccatgcgcgccatggggctcagccgcgcggtgctctggctaggctggttcctcagctgcctcgggcccttcctgctcagcgccgcactgctggttctggtgctcaaggtgggcgcgcctcggcctgcccggctgcagaatgggtgcgctggagggtgacagacaggggcggccccacgtgggtgcgcgcccccaggccaatccaggagctgcaccctaagctcccgttgcctctcacagctgggagacatcctcccctacagccacccgggcgtggtcttcctgttcttggcagccttcgcggtggccacggtgacccagagcttcctgctcagcgccttcttctcccgcgccaacctggctgcggcctgcggcggcctggcctacttctccctctacctgccctacgtgctgtgtgtggcttggcgggaccggctgcccgcgggtggccgcgtggccgcggtgagagccgggtcgggcgtggatgggggacgccccccgcttcggccgctcactgaccgcccgcttttccgcagagcctgctgtcgcccgtggccttcggcttcggctgcgagagcctggctctgctggaggagcagggcgagggcgcgcagtggcacaacgtgggcacccggcctacggcagacgtcttcagcctggcccaggtctctggccttctgctgctggacgcggcgctctacggcctcgccacctggtacctggaagctgtgtgcccaggtgggccgtagggggcggggctccgggccgggtcgcacctgctttgcgggaggctgagctaggggtgtggcctccaggccgtttgggggtggggggtggcttattcccttggagagaaggcggggcttcttggcacacgcatgcaggtggctgcattggaggggcggggcctgaggcaggtgggcggggtttctgggccgcctcatacctggacgccctgattccaggtgtatggccagaagctggcacagtcgccgggcgctgtggctcacgcttgtaatcccagcactttgggaggccaaggcaggagaatcgcttgagcccaggagtttgagaccaggctgggcaatatagtgagacctcatcaatacaaaaagttagctgggcgtggtggcacgctgggcgtggtggcacgctcctgtagtcccagctactcgggaggatggggtgggaggatcactcgagcccaggaggttgaggctgctgtgagccgtgatcccaccagcctgggcaaca[151 bp omitted]accccgtctctactaaaaatacaaaattagctgggtgtggtggcgggtgcctgtttcctagctacttggaaggcagaggcaggagaaatgcttgaatcccggaggcggaggttgcggtgagtcgagatcgcgccactgcactccagcctgggcaacaagagtgaaactcagtctcaaaaaaaaaaaaacaaaaaaaaaaaaaacaaggccgggcacggtggctcacgcctgctttcccagcactttgggaggccgaggtgggcagatcacgaggtcaggagatggagaccatcctggctaacacggtgaaaccccgtctctcccaaaaatacaaaaaattatccaggcatggtggcgggcgcctgtagtcccagctactcaggaggctgaggcaggagaatgacgtgaactggggaggcggagcttgcagcgagtcaaaatcgtgccactgcactccagcctgggcaacagagcaagactccgtctcaaaaaaaaaaaaaaacaaaaccccaaaaaaagcctggtacactcctggggggtgggctaagcaataacccgcgcccctccccgcaggccagtacgggatccctgaaccatggaattttccttttcggaggagctactggtgcggacctcggccccccaagagtccagccccttgccccaccccgctggacccaaagggtgaggcactacgaggcttaatagctggttgtccacatatgcccagttcccccccaaaacgagattccacagatgccaatgacaatgacctggacaccccaaccctcacacctgccctgaagacactgcggtccccaagctcccgcagcttttataggccccggcccagcaggtcccggattccacagcccagctctgagggacttgcaggccccaggacccccatgacctccatggctgagtccaccccatctctgcagtgctggtagaagaggcaccgcccggcctgagtcctggcgtctccgttcgcagcctggagaagcgctttcctggaagcccgcagccagccctgcgggggctcagcctggacttctaccagggccacatcaccgccttcctgggccacaacggggccggcaagaccaccaccctgtgagcccccaaccactccctccccgtgagcccccccactcccaccccgtgagcccccccaccactccctccccgtgagccccccaccactccctccccgtgaaccccccaccactccctccccgtgagcccccccaccactccctccccgtgagccccccaccactccctccccgtgaaccccccaccactccctccccgtgagcccccccaccactccctccccgtgaaccccccaccactccctccccgtgagcccccccaccactccctccccgtgaggccccccaccactccctccccgtgaaccccccaccactccctccccgtgagcccccccaccactccctccccgtgaaccccccaccactccctccccgtgagcccccccaccactccctccctgtgagccccccgaccgctccctccccgtgagcccccccaccactccctccctgtgagcccccccaccactccctccctgtgagttcccccaccactccctccctgtgagtcccccaccactccctccctgtgagccgcccaaaccactccctccctgtgagccccccaccacttcctccctgtgagctccctgtgaggcccccgaccagtccctccctgtgagcagtaatggcgccactgcactccagcttgggcaacggagtaagaccctgtctcaaaataaatagggcgggagtggtggctcacgcctgtaatcccagcacttgggcaagccgaggtgggaggattgcctgaggtcagagtttgagacacagcctggccaatatggcaaaaccatctctactaaaaatacaaaaattagccgggtgtgatggtggcgtgcacctgtaatcccagctactcaggaggctgaggcaggagaactgcttgaaccctggaggcggaggttgcagtgagccgagactgtgccgttgcactccagcctgggcaacagagtgagactctgtcacaaaaaaataaaaataaacaaataaataaaaataaggctatcacagggttttggatgtagcatttaataggtg[133 bp omitted]aaaatgcaaaaaaattagccggacatggtggcgggcgcctgtagtcccagctactcgggaggctgaggcaggagaatggcgtgaacccgggaggtggagcttgcagtgagccgagatcgtgccgctgcactccagcctgggcaacagagtgaaactccgtctcaaaaataataataataataataataataataataataataaataattaaaaattttttaaaaacagaaattaaaaatagaagctctgtaactgccagtgcactctgtgaagggggctactctgagacccctctatccacaggtccatcttgagtggcctcttcccacccagtggtggctctgccttcatcctgggccacgacgtccgctccagcatggccgccatccggccccacctgggcgtctgtcctcagtacaacgtgctgtttgacatgtgcgtctcggcaggcccagagtgcagcggtgggaagggactggacgccctctgggactctgcctgccatgtgggtcactctgctctgtgcactggccgcaggctgaccgtggacgagcacgtctggttctatgggcggctgaagggtctgagtgccgctgtagtgggccccgagcaggaccgtctgctgcaggatgtggggctggtctccaagcagagtgtgcagactcgccacctctctggtgagcccatccccaagggaggtcacctcacagggaggggcctggggattcatcctgaaggcagggggaagccgggtactgaggtccacgtgggtaggcaaccttgcccaaggctgggtgtgacacactgaggtcccttccccatctctaccaggtgggatgcaacggaagctgtccgtggccattgcctttgtgggcggctcccaagttgttatcctggacgagcctacggctggcgtggatcctgcttcccgccgcggtatttgggagctgctgctcaaataccgagaaggtaagagctggggattctgctcgaggggccagaaaaggcttctgacaaggaagtgctggggatggggttttgaggaatgagtaggagtttgctacatgtggaccccacttgttgctatggcatttaggggctactgctcaaataccgagacagtaagagttggggatagacagaggttcccctggattctgcctgaagggccagaaaaggtttccaacaaggaggttctggggatgaggttttgagggatgaataggagtttgcttcatggggcagacaactcctggcagaggccccagctcgggcaaagacgcggcggcctgatggtagttgtgggttggtcccccgtgcctaggtcgcacgctgatcctctccacccaccacctggatgaggcagagctgctgggagaccgtgtggccgtggtggcaggtggccgcttgtgctgctgtggctccccactcttcctgcgccgtcacctgggctccggctactacctgacgctggtgaaggcccgcctgcccctgaccaccaatgagaaggtggggaccggccttctcctgacccctgacccccgggactctgttcagccctgaaggccaagccacttggtgcctctctgcccgcaggctgacactgacatggagggcagtgtggacaccaggcaggaaaagaagaatggcagccagggcagcagagtcggtgagggccggggtgggagacccaaggcgggtgggcagtggggtggctgtgccttaacttgaggaggaggagggggagggggaagaggaggaggagggggaggaagcggcagaggaggttgaggcggaggaggagggggaggaggagggggaggagtaagaggtggaaggggaggcgaaggggaggagtaggagggagaggaggagggggagggagaggaggagggggaggagaaggggggaggaggaggggaagggagaggaggagggggagaagaaggggaggagtaggaggggagcagaaggggaggaataggagggggaggaggagggggagggaaagggggaggagaagggggagaagtaggaggaagaggagggggaggagaagggggaggagtaggagggagaggaggaggagggagaggagggggaggagaaggagaggaggaggagagcacttgagaacctgagatgatgcccccatccctgggctgagccggaaccatgagactaacttgaacactgaccccacctttaacccaaccagggctgagcccagagacaaacctacccctgacctccaacactaggtccagcactgccctcaagatctctttttgtttgtttctgagtcttgctctgtcgcccaggctgtagtgcagtggtgtgatctcagctcactgcaacctctgcctcctgggttcaagcatttctcctccctcagcctctcgagtaactgggattacaggtgggttccaccatgcctggctaatttttgcatttttggtagaaatggggtttcaccatgttggtcaggctggtctcaaactcctgacctcaggtgatctgcctgcttcaaccctcaaagtgctgggattacaggcgtgagccactgcgcccggccgcacctggcctacgttcttaaccctgatctctgtctgccgggacagtcccctcacaggtcaccaatgcctcttccccagggagactggggtggggcgtgagccggggctccctgaagcacccctttgtccacacaggcactcctcagctgctggccctggtacagcactgggtgcccggggcacggctggtggaggagctgccacacgagctggtgctggtgctgccctacacgggtgcccatgacggcagcttcgccacactcttccgagagctagacacgcggctggcggagctgaggctcactggctacgggatctccgacaccagcctcgaggaggtgtgaggcctgggtggtggtgaggtggggccaggaggagggcttcctggaggaggtggtgttttgaaggatgaatagcgtgtttatgagcagcaaggacattcagggaggaggcatggcacatgaggagctctggtggctcagatgtcccttgggaaggcctgggggacccatggtgtaggaggggtggggggctcacaagcccccagttctccctgtcggtgtccagtctctgagcccctgcttgtctccccagatcttcctgaaggtggtggaggagtgtgctgcggacacagatatggagggtgcggccacagctccctgacccctgaccccagtccagagtgggaccagaggccaggtccccatccctggcttagtgtggcccaaggcatagcctttaccctatacctgattcctgatcccccaatccgtgaccctcaactttgaccctgacccctgatggccctgcagatggcagctgcgggcagcacctatgcacaggcattgctggcctagacgtaaccctacggctcaagatgccgccacaggagacagcgctggagaacggggaaccaggtaagtccttcccagtggccctggggtcctcccagccacccccccacagcagcgtgagcactgaccctctcatccctcacagctgggtcagccccagagactgaccagggctctgggccagacgccgtgggccgggtacagggctgggcactgacccgccagcagctccaggccctgcttctcaagcgctttctgcttgcccgccgcagccgccgcggcctgttcgcccaggtgaggagggctagcaccagggagtcgcatgggagtccctgagttccctaccctggccgtccactcagtggcctaatccaaacccttacccccgtgtgtattcccaacccaaagcacatttattgagggcactggggagccatgggtggttgtagagcaggagcagggacaggtgcaagcaagcctggagggtggatggaagcagcagctgatgggctggtcccccagatcgtgctgcctgccctctttgtgggcctggccctcgtgttcagcctcatcgtgcctcctttcgggcactacccggctctgcggctcagtcccaccatgtacggtgctcaggtgtccttcttcaggtgggtgcagaaggaaggggctggtggcaggaagactagggacctgggggtacagccctgaccctacatctcccctcacacacagtgaggacgccccaggggaccctggacgtgcccggctgctcgaggcgctgctgcaggaggcaggactggaggagcccccagtgcagcatagctcccacaggtgaggcgtcttgttggcctggacctttcccctctctggcctcagttttcccatctggtccctggccagggagcctcagggggcacctggagcatcccctgtgcccacctgggagctgggagcctctgtggctccaggaacccccagaagctgggtgcccacagaccttcaccttgaccctgcagcgcccttgagtgtgcacagcccattgtctgcaggttctcggcaccagaagttcctgctgaagtggccaaggtcttggccagtggcaactggaccccagagtctccatccccagcctgccagtgtagccggcccggtgcccggcgcctgctgcccgactgcccggctgcagctggtggtccccctccgccccaggcagtgaccggctctggggaagtggttcagaacctgacaggccggaacctgtctgacttcctggtcaagacctacccgcgcctggtgcgccaggggtgagccatgccctgggactcagtttccctggctatagcatgggtccttgggttgctggggctggtgtggtcctggaggaggaagtggaggggttggatgcccagcttggggctacgggctgggagtctcgcgtaccttcctttcctctttttttttttttttttttttgagatggagtctccctctgttgcccaggctggagtgcagaggtgtgatctcagctcattgcaacctccacctcccagtttcaagcgattctcctccctcagcctcccgagtagctgggattacaggcacgcaccaccactcccgactaatttttgtatttttagtagagatggggtttcaccgtgttgccaggctggtctcgaactcctgacctcaggtgatccacccgccttggcctcccaaagtgttgggattacaggcaggagccaccgcgcccggctttctttcctgtttttgtccacccttgactctgtgctcccctctcaccatctctctctctgtcccacatccctgtctgcctgtgtctctgtccatctctcccacagcctgaagactaagaagtgggtgaatgaggtcaggtgaggaggggtctagcttggggtcccctgccccagttccactcccatgccctctgcctgccccctgggagctctcccggcccccccggccctcagctccccttccctgcctgcatggccccacagatacggaggcttctcgctggggggccgagacccaggcctgccctcgggccaagagttgggccgctcagtggaggagttgtgggcgctgctgagtcccctgcctggcggggccctcgaccgtgtcctgaaaaacctcacagcctgggctcacagcctggatgctcaggacagtctcaaggtgggaactgggggggcaggtgggcgtcctgtcacagcaaggtccaaccccattgctctgaccctatgaccttgacccccacccagatctggttcaacaacaaaggctggcactccatggtggcctttgtcaaccgagccagcaacgcaatcctccgtgctcacctgcccccaggcccggcccgccacgcccacagcatcaccacactcaaccaccccttgaacctcaccaaggagcagctgtctgagggtgcactgtgagtccctccaccctgcatgtcctaccctgcacgtcctaccctgcctccatttctctgtcgtttggggtggtgggagctggatttgaaccctgacacactcttgctttataaatgggggatagaaactgttcctctgctccctaagccagggaaatgggacctcctcagactcagcgggccccagcctcccccacacatcctcatcccaccaacctttatcctgcctgagacctgtacaacctctgctgccaaatcccaggcaccctcatccctaaattgcccctgccatctctgccactgctgactgccccatagacctttgtcccatcaatggcgtgttcagctctgctctgagcaacccatgcaccctcaccctacaacagctctcatgtcttcacctccaggatggcctcctcggtggacgtcctcgtctccatctgtgtggtctttgccatgtcctttgtcccggccagcttcactcttgtcctcattgaggagcgagtcacccgagccaagcacctgcagctcatggggggcctgtcccccaccctctactggcttggcaactttctctgggacatggtgcgggggctgcttggacgggtgggggcccagccactgcttgccactgccctgtctggccccttgtaggcaggggcttgtccaagatggcctgggtaaagtcttgaggattgtgggagactttgtgccttcctactcaaaaagcaaggaggtcagggtgggaacagggctgagggtggcagtgcccacctctttaggctgataaaggtaactgccatctccaatgcagtgtaactacttggtgccagcatgcatcgtggtgctcatctttctggccttccagcagagggcatatgtggcccctgccaacctgcctgctctcctgctgttgctactactgtatgggtgaggcccccagtccctcagggcctattcttactgaccccttactgccttccacattaatgctgctgagatagaactctgcagtgactcccaaggagaggatatggaggtctgaggtgatgccgtgtgtgatccaattcagtggtgtgccaaggtggccttaaaagctcatcttatcctgactcatattagtagagttctaaggcagcccatgcctgtaattccagtactttgggaggccgaggcaggaggactgcttgtggccaggagtttgagaccagcctgggaaacatagagagacccacctctaaaaaagaaagaaagagagagaaagagaaagagagaaagaaaaaaaaaaaaacagaaatgtgctttgggtgaaaatgtcaaggtctaaggcagagaagatgggaatggagatttttattcctctcagggcttctcagtctgagtggttactccagtgactcctattgtcccttcagctggtcgatcacaccgctcatgtacccagcctccttcttcttctccgtgcccagcacagcctatgtggtgctcacctgcataaacctctttattggcatcaatggaagcatggccacctttgtgcttgagctcttctctgatcaggtggggcaccacgaggctggggcttgggctgggttgggtcgttggactcagcccctgaccaacatccgtctcccacccttgagcagaagctgcaggaggtgagccggatcttgaaacaggtcttccttatcttcccccacttctgcttgggccgggggctcattgacatggtgcggaaccaggccatggctgatgcctttgagcgcttgggtgagaacttcctgtcaggtggggccatggctacagatagctagcacccttggagacctagagttaattatacagagtggagaaaaacagccccccagggagacagccagggttcttaggtggccctaaggttgggccaagttggaggtacaagaaagcagccataaaaagctaattcttagattacatcacaagaggcctcttctgttttctatgccaattagactccagctgagtggcctatccaatttgtgttcctttcccttaagaatccagagtgacatggatggagaaagggccagaaaccaagactctcatggacccagtccctcctttctatatccacaggagacaggcagttccagtcacccctgcgctgggaggtggtcggcaagaacctcttggccatggtgatacaggggcccctcttccttctcttcacactactgctgcagcaccgaagccaactcctgccacagttagtgaggtctatggagagggtggcaggggccaaggacctactttaagcccacagatattctgtccccaggcccagggtgaggtctctgccactcctgggagaggaggacgaggatgtagcccgtgaacgggagcgggtggtccaaggagccacccagggggatgtgttggtgctgaggaacttgaccaaggtaggtgtggtcaggtcgactgctgggtggggggtgctcccactggcccactcacctttctgaaagacctgcactctcccaggtataccgtgggcagaggatgccagctgttgaccgcttgtgcctggggattccccctggtgaggtgagtccaggggtggaggccaggtgcagggacagtgagtggctgccctactgcatgccctgcccatcatcctttactgaacacctactgtgtatccaccaccttttattgggcacctactgtatgccaatatttgtgctcctatttttattttattatattattatttatttatttatttatttatttatttatttgagatggagtctcactctgtctcccaggctggagtgcagtggtgggatctcagctcactgcaagctccacctcccgggttcatgccattctcctgcctcagcctcccgagtagctgggactgcaggcgcccaccaccacgcccggctaatttttttgtatttttagcagagacggggtttcaccgtgttagccaggatggtctccatctcctgacctcgtgatccacccgcctcagcctcccagagtgctgggattacaagcgtgagccaccacacctgccctattttatctttttttagagacggagtctcactctgtcgcccaggctggagtgcagtggtgagatctcggctcactacaagctccacctcccgggttcacaccattttcctgcctcagcctcccaggtagctgggactgcaggcgcctgcca[184 bp omitted]ctactgcatgcttacctctgttaaacacacactgtgctcactaaagaggtgtactgaatacttttgtgtccatcaacgtttatcaaataccaatagaatttattggacccctattgtatacacatctacatcaagcacttgctcacagccagcatttatcaggcacctgctttgtaccagttcacattcaagcacctactatatacaaatgtatttgctgtgtgccacttattggccacctactagggctggtacacatctgcaaacaagtgctgtttgttagcacacattgcagtatatatatatatttttttttctttttttttcttttgagatggagtctcactgtcacccagcttggtgtgcaatggtgtaatcttggctcacggtaacctccgcctcccaggttcaagcgattctccagcctc[133 bp omitted]tggcctccgaaagttctgggatcacatgtgtgagccaccatgcccggcctttgtttttttctttttttttttttttgagacaaagtctcgctctgccacccaggctggagtgcagtgtcacgatctcggctcactgcaacctctgcctcccaggttcaggcgattctcctgcctcagcctcctgagtagctgggattacaggcgcccgccaccacaaccggctaatttttgtatttttagtagagatggggtttcacaatgttggtcaggctgatcttgaactcttgacctcaggtgatctgcccacctcggcttcccaaagtgctggggttacaggtgtgagccactgggcctggcccacagtatatctttactaagcacctactgtgtgctggccaacctctctaccttgggctgactgtgcacctagcctaagtacacacagtgtgccaggaaacatatggagagctcatgccctgatatttgttgagcactgctgcacacgacctttatagggtacccactgtgtgccaaaagccattccctgctaagtgacagctttatgcctcgctacataccccaatatctgcctagctcccccggggccccacccacggccttccatgtggacactcagaaatcagaggtgctgaggccaggcgtggtggctcacagctgtaaccccagcactttgggaggccaaggcaggaggatcacttgaggtcaggagttcgagaccagcctggccaacatgccaaaaccccgtctctactaaaaatacaaaaattagccgggcttggtggcacacgcctgtagtcccagctactccggagcctgagacaggagaattgcttgaacccaggaggtggaggttgcagtgggccaagatcgtgccattgcgccggggtgacacagcaaggctccgtctcaaaaaaaaaaaaaaaaaaaaaagaggctgggtgccgtggctcacgcctgtaatcccagcactttaggagttcaaggcaggcggatcacaaggtcaagagatcgagaccatcctggccaacacggtgaaaccccatctctactaaaaaaaaatacaaaaattagctgggcatggtggcaggcgtctgtagccccagctacttgggaggctaaggcaggagaattgcttgaacccgggaggcagaggttgcagtgagccaagatcgcaccactgcagtccagcctgggaaacaagagcaaaacttggtctcaaaaaaaaaaaaaaaagaaatcagagatgccggaaccagggcctggggcctcactgagcaccatctgtgggcatccctgtagtgttttgggctgctgggtgtgaatggagcagggaagacgtccacgtttcgcatggtgacgggggacacattggccagcaggggcgaggctgtgctggcaggccacaggtgaggggtgccaggtagggtcagggtggggcagggttggccctgacgtccttgtgcttccccacccctccacctccagtgaatggactgggctcactgccccacacctgcatggtctctgagacccctgcacctctacctcccacacgcggaccaggccctgagacacccctgtcccttatcagcgtggccctggatgggtgggccctgagacccctgtgttagccaccagtatggtcagggactagccagctctctgagcccccggcgcccccatccccagcgtggcccgggaacccagtgctgcgcacctcagcatgggatactgccctcaatccgatgccatctttgagctgctgacgggccgcgagcacctggagctgcttgcgcgcctgcgcggtgtcccggaggcccaggttgcccaggtgagcccactttgtccccaccgctctcacctcccagggcccacccgacccaggccgtgcctctaaagcctggcccaatcccgcactctctcgccttggctccatccctgtccctgcccccagaccgtgcttccttcccctatacctctgtcccccatcctggtccaatagggatgtggctagcccgcctctttgccccgcaacaccaagttccaccattctcattggtccacccacccttccttccgctgcacgttgcccctctctccttgactctgccttctgtggccctgcccacttgctcctcttctgcctaccccctagggcttcgcgcctttctcgctggggtcacggtcacattctcactctggccgttcccagtttgcagccgtttcactgcctcttccatctgcttgggggtcttgtctttgccctggcccgccccaccctcacactgtcccaccccatgccctttctggccctgcctcatacccatgttggctccacccacaccatggccctgctccatacccatcccagctccacccataccaaggccccaccccatactcatgctggctccacccacaccatggccccgccccatactcatgctggctccacccacaccatggccccgccccatactcatgctggctccacccacaccatggccccgccccatactcatgctggctccacccacaccatggccccaccccatactcatgctgtctccacccacaccatggccctgccccatactcatgctggctctacccacaccatggccccgccgcatactcatgctggctccaccagtgtggccccgccccatactcatgctggctccacccacaccatggccccgccccatactcatgctggctccaccagtgtggccccgccccatactcatgctgtctccacccacaccatggccccgccccatactcatgctggctccacccacactatggccctgccccacacccatcccagctccacccacaccatggccccgccccatactcatgctggctccacccacaccatggccccgccccatactcatgctgcccccaccacactatgtcccattctcacatttgccctgccccatgcccattatgcccctgctccacactcaatgctggccccgccacactgtggccctgccccatactcatcaatatgagtccccatgcctactctggccccaccccacagaccgctggctcgggcctggcgcgtctgggactctcatggtacgcagaccggcctgcaggcacctacagcggagggaacaaacgcaagctggcgacggccctggcgctggttggggacccagccgtggtgtttctggtgcgtgggagcggtgcctgggtggggtggggcctgcgacggaggcggggccttgcttatgggatcttccgtgctccccaggacgagccgaccacaggcatggaccccagcgcgcggcgcttcctttggaacagccttttggccgtggtgcgggagggccgttcagtgatgctcacctcccataggtgggccgggctctgatgccctgggctgtggttaaggtgatccaggcctggagagagagccccaaagcacaaggccacaggggatggggggtcctggccctagtggggcgagggcgccaggccccggggtgtaaggacacacagaggtgggacgcggcgccgggatcagaacggtctggggaagagtggggagatgtccacaccagaagggtggcccaggccgggggaagcaggcagtgtggcgccaggcacaggtggccccggcctcacggagctcgtggtgccgggtcccgacagcatggaggagtgtgaagcgctctgctcgcgcctggccatcatggtgaatgggcggttccgctgcctgggcagcccgcaacatctcaagggcaggtgagccggcgcggcctccaggcaggtgtggggtgagggtgggcacgtaggtaggctcaggggagaggccagacgtagagccgggtgaggaaagtttggctccaactggagagatggccaaggctttagattgtcctgcaggggtgactgagggggcgagacaggctggggtgtgctgggggcgcaggaccaggaggcgtgagccgggggctctgggtggatttagaagacacaatcaggtgtgcgttggagtaggtgcagcctggagaggtgagggtggattgatgggtggagttaggggagggcctggttagtgggcggggccataggaaagtggggcgggggtatttattgtgtgggcgggggtagagtgcaagggcgaaagaggagtgtccgaaaaaggagtcaagtggggtgatagcttcgagagcaacctgggcaacctagggagaccccatctctataaaaaatttaaaaattagctggacatggtggtgtgtgcctgtggtctcagctacgcgggcggggggtggcgggggactgagacgggaggaccacttgatcgctagggtagtacaagtatggggcggggccagagagtattaggggctggagggtgagctgaggtgggacctgggaaaggcccgatccggtagccctggccccactcactgcagattcgcggcgggtcacacactgaccctgcgggtgcccgccgcaaggtcccagccggcagcggccttcgtggcggccgagttccctggggcggagctgcgcgaggcacatggaggccgcctgcgcttccagctgccgccgggagggcgctgcgccctggcgcgcgtctttggagagctggcggtgcacggcgcagagcacggcgtggaggacttttccgtgagccagacgatgctggaggaggtgatcacggcgccggggtcgggctgggggaggcaggctgggggccaggcccgtgggctgaccgtccctcttgtcccctctgggctgcccaccgctaggtattcttgtacttctccaaggaccaggggaaggacgaggacaccgaagagcagaaggaggcaggagtgggagtggaccccgcgccaggcctgcagcaccccaaacgcgtcagccagttcctcgatgaccctagcactgccgagactgtgctctgagcctccctcccctgcggggccgcggggaggccctgggaatggcaagggcaaggtagagtgcctaggagccctggactcaggctggcagaggggctggtgccctggagaaaataaagagaaggctggagagaagccgtggtggtgaaaccgtgtgcatgtgtgtccttgagccaggctgcacacatgtccacacagctgcctgcacatgcgtctggatatggctggccccttgcaagctgagtgtgcacatacgggccaagtggcgattcataggacacaggtgtgagcgtgcctacagctgaccggatcccagctgtaaatgcctctgtggccagcccaggagttggggatgtgagtgcgggcctcataagggcctggtcacaccgtccctgtccccacgtccctgcgtgcctatgtggggctggcgcctaagggcggtacctgtaagtgcctggccataaagtggggatgaggtcaggactcaggaatgtcctgggaagcttacaggagcccggtgtcccggagcacaggccagggccgggccagaagcccatccgacatccagctgaccctcaccctctgaccccagccctcagcgccatgagtcgggggcaaagagttctcaagggtctgctgggctgggtttgcacttggacctgggcctggagagccagacttggagcaaggggctgtggccttcatgtcctgtgccccagagatctgcccctcccacccgaggtaggtgggaatggggtttgggaaaggaaagaggttggggttttgggattgggggtggggttctggaaggggacagcagggagacttggggaggggggagagagttcacactgcggggtgggggttgggggaaggtaggaggctgggatctgtatgcctgcagatgccccagctcttggccaatgccgcctcaggctgttatcagcaacgggtgcctgcgtcctgctgcccagcacgtccggtggtccagagtcactggaatgcagcttgggaggcggggctggggaccttagctaagggcaggtctggggcaacatgatatggcccacagggctgctgagaggtaaccaggtgtcctcagcatattctgccgatggtggggtccacaccacactttggggacccctgtgcaggcagcccaggaccaggtggacgtggggacccagacggacgtggggacccagacggacagggcccggtaacctggattgttctgacttcctggacgtctttgcccccagggtttcggttctgggcctcagtttccccacctgtcctcgacctgacccacttcacggggctgcagggcgggtgatgggggggaccctactctgcccggccctgctggggcccggccacaccctagggtctgcaggagaggcggtggagcgggcttgccttcagggaaaagggggctgcaggggcgcagcttcggcctgtgcgtgtgtctggggtctgagggcgaggctccaggggcttggtggcgtctgagcgcgtgtggaggtccgggtctctgcgtgtcatcgtgcacgtgtctgtgcacgcccactcgcgtccgggagtgagagtcagcgccctgcagtcggccgccccgtgcccgccagcgtcaggcaggggctcccggtcccaccccgcgagcggcgcggctccgagctcccgaaggcggaagcggggggcgcggcccggggctgggggcggggcctgcgacctcaccttcgcgcccactccgcagagccgcaggctgaggccgggaagggtcgggggcgaggccgcgtcgccgcctccccgaagccttttcctgttggggggagggcccgccagtgacggccgggcctgtcacgtgggcctgacagctggggagggggtggccggcgacaatgtggtcccgaagcggccagcgccgggagctgcagcgctgagacccccagcccgccccctcgggctcccggccggggccccatcatgttctccaggaagaaacgagagctcatgaaaaccccttccatctcgaaaaagaaccgcgcgggaagccccagcccgcagccctcgggggtgagtggagcccgggtgagacccggagctgacgccgggccgcagggggacagggacccgccctgtgctcggggctcatgctggggcggcggctgggggctcgtgccagctacagcccctaccgggcgggacggcaggggccacagcagagaggccgggaccccggcattcagctcacggtagggaccctgggagtggtggccgcctccctccactccatccagggctggccgcggggcccagggagcaggaagggagggtgccgggttgggacgatgttgtgtttgggccgctgcaggttgggggcttaggcaatctgggggctctaggggccgttgagatgggagggctgtggcctggccattgggctgaaggttgaccgggcagcagatcctctaatgggatccaccaggttcagaggttggggagtgtccccaggcctggggtgtctacaaagctggggggggggtctacagagcttgggggtccgggatgtctacaaggcctggggctgcccataggctctggggttccatggacctttaggggacagacagagtcagaagtgtgttcacttaaagcacctgcgttgtaggagcctgaggggggcttgaagggctgaggaccctccccacccccaccaggaagtggggacccccctcccgcgcctccccgcaggccccgccccggctgtggtttgggcaaggaccgttgtttgtgaaagctctagggaagaggatgttgggtaacaggtgggggggtacactaccaaatctcggccctgtgacctctggcctttgacccctgtggggtcagggtgatggtggccctccacagccccacttcatttctggggaaactgaggccgtgtccaggccggaaaatccctttaacgagctcccctcggacctgcccaaggagctgcccaggaaggatggggctgacgcggtgttccccggaccaagcctggagccgcccgctgggtcctccggcgtcaaggccacagggaccctcaagcggcccaccagcctgagccgccacgccagcgcggctggcttccccctgtcgggtgctgcctcctggacactgggccggagccaccggagcccactgacagccgccagcccgggcgagctgcccaccgagggtgccggcccggacgtcgtcgaggacatctcccatctgctggcggacgtggcccgcttcgctgagggccttgagaaacttaaggagtgtgtgttgcgtgacggtgagagccacggggacaccgaggcctgggtggaagacagagccagacccaagggaggatggagggagggacttggggaggctcagaagggagggaggctcagatggcagggagggctgtgtggaagaggccatgacagctaaggctctgagggatgtgtaggagtttggtgggggagtccctgagcgtacactggctcaagagggtgcccactttattttttttaaaggatctgatggcaattaggagggaaaggcagaggaaatgtcccatgcacaggctcagaaacacggaaacagagaatgcatttgggggccaaggtgtggggtgccgctggtgtaggatgaaggcatgacaacgccaggcagaagggcaatggggagccatagaaggtgttagagcacaggacagatgggggcagatctgtgtcttggaatgaagcaaactgggggttggctgaggtctgggtggagagagattcaggaggcatggcgaggggcaggatggggtcatcaggcggcggaggtgctgggacccagcggcctgcaggccggcagttccgttttctcctccacgcggccgctgacagccctgcttcctgccgagttattttcatctgcttcctgtttgtccctggcagcccaggcgggcacctcatgtgctgccttcagcccccggctcctcccagaaaccacagtgccagggtcatgccaggcgctctgatctgctcccagcagccgcccattttacagatgacgaaactaagtctctagtgaggccctgacccctggctcacccagccagggcagggcagagccaggactggacctcaagtggtggagtggcctctgcaccttcagggcactagttggggaaggcccggtccccactgggaggagtgggagcccccgggttatctggtcccaggggcgggggctaggctgctttcctggggaaaccctaatctcggttcctttccgatcctggcgcttccttggaggcctggcctgggcggggctcagctcccaggctcctgcaggaggtctgaactgggccagccagggtggggcacttttttttttttttttttgatacagggtcttgctctgttgcccaggctggagtccagtggtgtgattgaggctcactgttaccttgaactcctgggctcaagccatcctcctacctctgcctcccgagtacctgagactacaggcatgagccactgcacct[136 bp omitted]ggctcccgagtagctaggactacaggtgcgtgccaccacacctggctaatttttgtatttttagtagagatggggtttcaccatattggccaggttggtctcaaacccctaacctcgtgatccgcatgcctcagcctcccaaagtgctgggattacagcaggcatg[132 bp omitted]cctccacctcctgggttcaagtggttcttctgcctcagcctcccgagtggctgggattgcaggggcgcgccaccgtgcccggctaattttttttctttcttttttttttttttttagtagagatggggtttcaccattttggccaggctggtcttgaactcctgatctcaagtgatccacccacctcggcctcccaaagcgccaggattacaggcgtgagccatcgcgcccggccagtttttgtattttttgtagagaccggggtctccccatattgcgcaggctggtctagaactcccgagctaaaaaccgttctcccggctccgcctcccaaagtgctgggataacaggcctgatccaccgcgcccggctgggggcgccttctgtgcgtctcggggccgccccaggccagagaagaccctggcggctaggatgtgggctctagtcccgatgtttctcagctgctgagaccctggcaagccccttccctctctaggtgtcaggtgacttatctataaaatggggccacctgcatgcagcgatggttgtggggtccaccccacagcttggggacccgcgttcaggcagctaggaggggacccacatggacggtgccaccccgacacttcccgggcttcctcgttcccgggcttcaggtctgggcctcagtttccctgcccgtcctcgaccctccccacctcgaagctctgcggttaaggaaggacccaggctggggcgaacgggaccccagggcggggtttccctcgcgggggcggggcctcctgaccggccggagccggtttggccaccggagacccccatcggtcagctgccaggccccacgcgctcgcggtctccgcgccccgacggctgcgccatgtgtatctgcgggacggcgcacccggtgctggacgagggccccgtgcgctgccgggcgggcccccgaggtgaggggacaggtgccgggcgctgggtcccgccgcgtccgggagcacgtggcgctcgggccgtttgccgcccgcggtgggggagcagcggctgccgcgcgcctggcctggccgtgcgcacctgggcatccctgcgctgcgcaggggtcgcgccggccgccggcttcccgggtagggggtgtgcggggacagccgggggtccgtgcgccggccgcgcgcggagtgccgggtgcccggctggaaggtcccgagaaggggcgtggccggggcctcccagcggcttcccggagctcctggagccccaatcccattcccggagtccgcctcgcatccagcagcgaagacatgttccggtccggggtctcaggcccggcggcggccagcggggtatctctggcgggtgactcggtcggtctcttcccggaggtgacattcacctggggtcttcggtgccgaaagggatggggcacttactttttcagatttcatttcgtatttggggcatcctctgagcggtacagtcaggcgtcaaagctgcccctcccgctggcctctgtcctcccgggtacctttcccctcctacgaattccgtgggtttgtttccactacgtggtgtgtgcctggctctcgatgtttcgcctgtactctctgcttttttcttttctttccttcttttcttttctttccttttctttctttcttttctttcctttctttttgggatggaggagtctcactctgtcacccagctggagtgcagtggcgcgatctcggctcactgcaacctccgcctcccagcttcaagcgattctcctgcctcagcctcccgagtagccggcattacagaggagtgccaccacgctgctactttttgtatttttagtagaggcagggtttcgccatgttggccaggatggtctcaaactcctgacctcaagtgatctgcctgcctcggcctcaccaagtgctgggattacaggcatgaggcactgtgcttggccctctctgcttttttcttcttccaattgagaacgttcgatgagggcatttagctttttattctttattttatttcttacagagacagggtcttactgtattgcccaggctggtcttgaattcctgggctcaacccgtcctcctgcctcagcctcccaaagtgctggggtcacaggtgtaagccaccacccctggctgaggagggcagtgaaagccaggttccaacagtcagatctgacctcctctgttctaacaccttctatggctccctattgccctggagataaagccaggcaggatccctctgcctggcgttctcacgccttcagagctagcgtagatggaaaagctgtgtgattgttgagaaatggcttcccctctctatgcctcagtttcctcacttaggaagggcagagagagacctggacagggctttgagcagtcctgaggagttagggcagggaaggagcctggtgggctgcatggaggaaggggctgcaggactgtagcttgaaggacaagaggcagtttgctttctggagggacaagaaaagagtgttctgagcagcagagtgcctaggccaacgtctggcctttgttgatctggccggtagcccagggagggacagtgccctccccgcggtctcgaaatgagccccaggcatctgccgtcttccacctctgcctcagtttccccatctgggaacaggagctctaaagagggaggaggtggacagactttccctgggactgggccctaccccactgctcactccgactctccccagcagacctccttgaggcccgccgcccgcgggcccacgagtgcctgggtgaggctctgcgtgtcatgcatcagatcatctccaagtacccgctgctgaacaccgtggagacgctcaccgcagccggcaccctcattgccaaggtcaaaggtcagcctgctggaacagggctgcgagggctctctgcctagaagggcatcctggaggaggggatgtttgaagtgggttttgaaggatgcataggagtttgacaggcacaagctccctcctgttccccctgggttaagggctccggtcagttcttgcagggatggtcacctcccagagtgggcccacctccttgtccttatctctgcttcccagccttccattatgagagcaacaatgatctggagaaacaggagttcgagaaggccctggagacgattgctgtggccttcagtagcacgtgagcacgggagcctgtggggcagggcaagggagcgtggggggcccgggtgtctctcgatggtgacctcgctggccctgcagagtgtccgagttcctcatgggtgaagtggacagcagcaccctcctagcagtgcctcctggggactcgagccaggtgagtggggtgggccagggccacctgtgtccagcttctggaggccagccgggttcaggtctgcagggcccagacagtcaccctgcttcccctgtgcgccttggtttccctctctgggggaggcagcaaccgtcccctgaagggtgggcactgcccagggccccgcatggggctggtctcacctgcgtctccgtcctacagtccatggaaagcctgtatggaccgggcagtgagggcacgcctcccagcctggaagactgtgacgccggtaagcccccacccagcggcaggcaggcatttgaggggtgggccattgcgcgggtcgggccaggctgagcaggcccccgttccctgcaggctgcctgcccgccgaggaggtggacgtgctgctacagcgctgtgaggggggcgtggatgccgcactgctgtatgccaagaacatggccaagtacatgaaggacctcatcagctacctggagaagcggacgacgctgggtgagagctggtgtcccagcagggtgggtctggagggagggggttctgggtgagctgggaaggccttgtcccagcacctcacacccctctccggcccgcagagatggagtttgccaagggcctgcagaagatcgctcacaactgcagacagagcgtcatgcaggaggtgggggccccgcgggcacggggcgggggtccctgggcccgggtgtgagtctcagccccatttcaagggcccagggaccaagagcaggggcttcccctctacattaacgggggtggctgcagggaccagggagctggtggctgggggtgctggggccgccctgcctccatccctccccacccagtgagccggtgccccacccacagccccacatgccgctcctgtccatctactcgctggccctggagcaggacctggagttcggccacagcatggtgcaggcggtgggcaccttgcagacccagaccttcatgcaggtgcgtggtgcccgggagggcgggctgggcgggggtgtcaccggggtacccactcacggcccgtctcgccccagcccctgaccctgcggcggcttgaacacgagaagcgcaggaaggagatcaaggaggcctggcaccgtgcccagaggaagctggtgaggcgggcgggcgggggcgggcgggggcgggcagcgggcctcggcgcaggcgcagtcccagccccagccccatagcgagggccctgcggcgagctccgcacacgccccggcctcctgcgcatgcgcggcctcgcaggctgggccgccccccccaacgccaagccgggtcggagatgctccagccccgtcgcccccagctctgcctggaaggacccaggagcccggcgctcactgctgtccctgcagaaatggggagaagccgtgcctccctcggttgtaagcagctggtctccgggttgagggagactgatggtctctcaggactgggaaagcgccatgctcctgcatgtattctttttttttttttttttgatacggagtctcgctctgtcgcccaggctgcaggctggagtgccatggcaccatctaggctttcactgcaacctccatctccctggttcaaacaattctcctgtcgc[134 bp omitted]cggcctcccaaagtgctgagattacagacgtgagccaccgcacccacccggcctcctgcctgtattctcttcccacttcgcttttgggttatttcaaagacgccggcgcctttttgtttgtttctttgcttgttttgagataaggtctcgctctgtcacccaggctggactgcagtgacgcaatcatacctcactgcagacttgccttcttgggctgcaatgatcctcccacctcagcctcctgagttcctgggtctacaggcaccagccatcacacccagttcatttttttgtattttttgtatactcactatgttgcccagtttttgtttgctttttagctgtgttaacacggtctgcagtgaaacgcaccctcctagctccttccagcacataccggcaaacacatatctgccctgttttgtacacacgaggacagctcacctcatgccctgttctgctcctgatttttatcctcacctccatatagagaggctcacccgatatcagtcagcatgaagcagcctgaaccccttttttcggctgtgcagggctcagctgaggagattgagtaggttatttcatggacgtcttgggagtggctgagctgttgctgttacgaacaccattgctatgacaagcttgtgcccctgtctcaaggatgcctgagggatcagtgcccaaaatagaactgctgggtcaaggggcgtgcgtgtatgagctaccctcccaggccacagccctgcttttcctcttctgtgaaccctcagttcttaacctttgcttagttcttatcctttgcttactttgtactggacagtggcttatcattgatttgtcagagctttttacatattagagaacttaggccttaatcatgtgagttttagactccccccattcccctcccacaatttactgtttgacttttgatttttacctg[131 bp omitted]cactgcaacctccatctcctgggctcaagcgattcttctgcctcagcctcccaagtagctgggattacaggcgccagccaacatgcctggctaatttttgtatttttagtagagatggggtttcaccaccttggccaggctggtctcgaactcctgacctcaggtaatctgcccaccttgtccttccaaagtgctggaattataggcataagacaccgtgcttggctaatttttatatctttggtagagatggggtttcatcatgttggccaggctggtctcgagtagctaggaccacaggtgtgcgccaccacgtctggctaaattttttaatttttttgtagagatggggtctcactatgttgaccaggctggtctcaaactcctggcctcaagtgatcctcctgcctcggcctcccaaagcactgggagtacaggtgtgacccatggcgcctggcggtctcctagtaattggatgagtccgtttgtttgtgtgcgaatctgatggtgcaggttgtgaggtgtggcccccgagcccacaggtttttgactaagtgctcttcctgccaacctgtgggcgcctggcttcctgcctgggcggcttctctgttctcgtctgtgaggagggaagtgaaagcaaaagagcccggagacgctcccgtgggggctggtgtgcgtgtctgcagaggctgccgtgtgagcctctgtgcagagcttggctgcacctcagcttcccgggctgcagagtgggcacacaggacacccatttctccgagtgtcctgttacgggtgcctcctcccgttcttttttttttttttttttttgagctggaatctctgttgcccaggctggagtgcagtggtgcatgcaatcttggctcactgcaaccttcgcctcctgggttcaagctgttcgcgattctagtgcctcagcctcccgagtagctgggattacaagcgtgcaccacaatgcccggctaattgttttaaattttgggtagatacggggtttc[131 bp omitted]ttgtgcagggtcctctgcatgcccagctgggccatggggccttgctgagagagatgggggtggggaggaaaggaggagctggggagactgagtcccatccgaggatagggttggaactggcctcctggctcccacacccacagcaagaggcggagtccaacctgcgcaaggccaagcagggttacgtgcagcgctgcgaggaccacgacaaggctcgcttcctcgtggccaaggcggaggaggagcaggctggcagcgcgccgggagcaggcagcacggccaccaagaccctggacaagcggcggcggctggaggaggaggccaagaacaaggtgagggcgggtggaggcagggctggaggtccctggaggaggagatccaatgcttggtgtgacatttactacctccagacctttgtttttgtttttttgtttttttgtttgtttttgagacggagtcttgctctgtcgcccaggctggagtgcagtggcacagtctcggctcactgcaagctccgcctcccgggttcacgccattctcctgcctc[175 bp omitted]cccggccaatttgttttttggagacagagtctcattctgttgcccaggctggagtgcagtggtgagatctcactgcaacctccgcctcccaggttcacacagttctctgcctcagccaccctgccaccaagcccagctaatttttttgtatttttagtagacacagagtttcaccatcttggccaggttggtctcaaactcctgacctcatgatccacccacttcggcctcccaaagtgctgggattacaggcatgagccaccgcgcccggccccgatttttaaattattattatttttgagacagtgtcttgttctgtcacccaggctggagtgcagtgacgtgatcatggctcactgcagcctctacctcctgggctcaagcaatcttctcgcctcagcctctagagtagctgggaccacag[355 bp omitted]ctcaggctgagtgtggtggctcacacctgtaatcccagccctttgggaggctgagacgggcagatcatatgaggccaggagttcgaaaccagcctgggcaacatggtgaaacccctgtatctctactaaaattacaaaaaattaaccgggtatggtgggtggggggcacctgtaatccgttacttgggaggctgaggcagaattgcttgaacccggtaggtggaggttgcagtgagctgagatcgtaccactgcactccagcctggcctacagagcaagactccatctcaaaaaaaaaaaaaaaaagatggggagggtctcaccatgttgctcaggctggtctcgaactcctggcctcaagcaagtctcccactgtggcctcccgaggcgctgggatgacaggcgtcagccccgcctccctgaggtttctgtctgagtcctgcaccccgggctgaggcctctctctgtgcgccccgcccccaccgcaggcggaggaagctatggccacctaccgcacctgcgtggccgacgcgaagacgcagaagcaggagctggaggataccaaggtgacggcgctgcggcagatccaggaggtcatccggcagagcgaccaaaccatcaagtcggtgcgtggggtgctccggccgcccgggcggggatggtggaccgggcggcctcctcctgacccctccgctctccggtgccgcccgcaggccacgatctcctactaccagatgatgcatatgcagacggcgccgctgcccgtgcacttccagatgctgtgtgagagcagcaagctgtatgacccaggccagcagtacgcctcccacgtgcgccagctgcagcgggaccaggagcccgatgtgcactacgactttgagccccacgtctccgccaacgcctggtaccgccacccagctgccctgtccccggcgcacaaggccctgcctgggagccgggcttccctctgtcgggggcatgaagatgaagctgtcttgccccccatcacctcccctccttttcccggtttcttccactaggtcccccgtcatgcgtgcccggaagagcagcttcaacgtgagtgatgtggcgcggccggaggctgccgggagccccccagaagaaggcgggtgcactgagggcacacctgccaaggaccacaggggtgagtgtccggcggggcccaggggcggacgctggctccctgcgacccaccctggcccttcaccagagacgcctctttctccagccgggcgaggacaccaggttcacaagtcatggccgctctcgatctcagactcggacagtgggctggaccccggccctggcgcaggtgagggaggctctctggcgggctggggtgtggagctgcctcctctcctgagcctcagggtttcatcacccaccggggtgatggagggggcccccctggctgggggagtctgaacagtcctgattcccgcccaggggactttaagaagttcgagcggacgtcatccagtggtaccatgtcgtccacggaggagctggtggacccagacggtggagccggggcttcagcctttgagcagggtgagggtcccctgacggggctggagagagaggggggtttggacacagtccatgggcctggccctgagctgccttggtgacaccggctgcctgtgctgcccgcagctgacctcaacggcatgacccccgagctgccggtggccgtgcccagtggaccgttccgccacgaggggctgtccaaggcggcccgtactcaccggctccggaagctccgcacgcccgccaagtgccgcgagtgcaacagctacgtctacttccagggtgctgagtgtgaagaggtgagtgggacgccccgacggacagctgggagccttcgggagcctttggggtgcccagcaccgccggcctgtgtgccctcaggaatgtccggcccagagcagggagcagtcggacgcctttggaaggaagcgaacggagggggtggggtgggctcttttagttctggggagcagggttggctctctgaggcagcgaggcagggggcagacctggagggtgaagagtcctggggctgtggccagaagacctggagggcaaaggccctggagctgtgtccagaaaaccaaggggcgggaaggagaggaggccacagggcaggcgggatcacccctggggtggaagccacgagccactgtccagcttgtgtttgcagaagctgccgtgtgggggctgtgagcgccccggggaggtggggtggagccgctgggggctgcgctgagctgggcgccccggggctgggctcactcactctggccgcccccagtgctgcctggcctgccacaagaaatgtctggagacgctggccatacagtgcgggcacaagaagctgcaaggccgcctgcagctgttcggccaggacttcagccacgcggcccgcagcgcccccgacggcgtgcccttcatcgtcaagaagtgcgtctgcgagatcgagcggcgggcgctgcgcaccaaggtgaggcgggggaggaagcggctcacagcgaggaggcgggagtgggccgaggctgatgggcctccccacccccgggctcccgcagggcatctaccgggtcaatggggtaaagacacgcgtggagaagctgtgccaggccttcgagaacggcaaggagctggtcgagctgtcgcaggcctcgccccacgacatcagcaacgtcctcaagctctacctgcgtcaggtgagacccaccggtggtggccaggcagagcctggaaggggcgtagccaggcaggaggaggcggggtgggggtccgggagctggagcaggactgagctggagcaggactggcgcaagcgggggcctggggaggacagggtgggcgggacagtgcctggcagggcagggctgaggctgggggcgtggtcacggtaggagcgaggcggggccagttctgcgccgaggcacggacagggacaggaggggcggggtggggcttggtcagcacgtggcaggggtgtggccacggcagaggcacacctgacgctgtgcgggggcggggccggggccggggctcggtggggcgtggccagagcaagatgggcgtgttcagcgcttggcagggacccgtatgaggctaggggcggggctgaggctagacaagtgcggggctggcggtggggcctgggcttggtggggcgaggctggggccaggggcgtggtcatccccggggaagggcgggactggggctaggggcgtggtcatgtctggggaagggcggagctgggctgggatgggagtgggaccagcacttcgcaggtggttgggaaggggtcagactatgctgagtggagccggagctcgttagggtacctgcagggcggggcgcgcgtggccagagcgagaaagggagtggagctgcgggcgtggcccgggtaggaggggcagggctcacgctgggctgggaaaggggactgacgccgctctgggtggaacccgagctcggtggggtgtggccagtgctctgtgggggtggggctgaggctgggggcgtggcaggcacacgtgggggctgggccaggcccaccaacacctgctgacccttgactctgcgcagcttcccgagccgctcatctccttccgcctctaccacgagctcgtagggctggccaaggacagcctgaaggcagaggccgaggccaaggcggcgtcccggggccggcaggacggctcggagagcgaggcagtggcggtggccctggcaggtcggctgcgggagctcctgcgggacctgccgcctgagaaccgggcctcgctgcagtacctgctgcgtcacctacgcaggtgagtcccggcatatggagtggagggcgcggggtcccgggagccgctcagcacctggcccctgcccaccccgcaggatcgtggaggtggagcaggacaacaagatgacccccgggaacctgggcatcgtgttcgggcccacgctgcttcggccacggcccaccgaggccaccgtgtccctctcctccctggtggattatccccatcaggcccgcgtcatcgagactctcatcgtccactacggcctggtcttcgaggaggagccggaggagacccccgggggccaggtgagggtgtgggcctgaccggggctggccactcggggcttggggagcagggggcgctgctggggacagtcgttgtcggatgaagcccaaggaaccacagggagataatttggtttggacagggctgttcgggaggccactgtctttttgtgtcttttatgcaaaaaactcagcgaggtctgcattgaatctggcagaggtgcaaaggctctgcggccgcccctccactctcccttggggctggccttgggcctcacccttcacccccagcttccttccccgtttcccatcccggtgctgcctgcagccacaagctccacgctggcccggtgtccacagcctgcccgagctgccactgcactccgccgcgaggtcaattccccgcttcagattttcttttctgggagttgtagtttcgctcctgctgcccaggctgaagtgcaatggggcgatctcagcccaccacaacctccgcttcccaggttcaagcgattctcctgcctcagtctcccgcgtagctgggactacaggcgccggccaccacacccggctaatttttgtatttttaacagagatggggtttcactttgttggccaggctggtctcgaactgctgacctcaagtgatccgcaccccccttggcctcctgaagtgctgggattacaggtgtgagccactgcacgcggcgtctcgtattctttcaatccatcttccctgggtgtttaggggctgcggtttctcgggtttgctcttggctgaggacagaccgcctgggcaacagcgggtgtcagtagctgttacgggctgtgtgggtgggtttgttaatttataacatggaaaatggagccccggcccctctatgacttccgttctgcacttgcaggacgagtcatccaaccagcgagctgaggtagtcgtccaggtgccgtacctggaggcgggcgaggcggtggtctacccgctgcaggaggcggcggcggacgggtgcagaggtgagtgtgtggctgcccgaacggccccaagggaggctggcgtgtgccacccatgggcgcaggtgccatgacctagttgtacacacgtggcagggtccacggtgctgcacattctgtggatttcgtctgccacggagaccacacctatgagctactcattcagtgtcctttaaccggctgcaaaaacaggcaaggcagtgccttttgaggtgcctaccccgcactcagaaaccagtaacgtgaacgtggggctgatgccttgtgaggctccaggtgcaccaggtcaggctaagtgcctttcctgcaggagcccgtttttctagagaagggcgtggggctgggagtttgacccacgtggggccagcaccacctgtcagaggcagctggccgagtgccgcatctagttatgggacacctgtgttgtctgtcttcacactgctgataaataaatacctgaggctgggcacggtggctcacgcctgtaatcctcgcactttgggaggacaaggcagatcacttgaggttaggagttcaagaccagcctgaccaacatggtgaaatcccatctctactaaaaatacaaaaattagacaggtgtggtggagggcacctgtaatcccagctactcaggaggctgaagcaggagaatcacttgaaccggggaggcagaggttgcactgagccaagatcatggcactgcactccagcccgggcaagagagagagactctgtctcaaaaagaaatacctgagactgggcaatttacaaaagaaagaggtttaatggagttacagttccatgtagctggggaggcctcacaatcatggcagaaagcaaagaggagcaagtcacatcttgcatggatggtggcaggcaaagggagagcttgtgtccggaaactccagtttttagaccatcagatcttgtgaaacccacgtactatcatgagaacagcccaggaaagacgcacctccaggattcaaccatcctccaccagctccctcccacaacacgtgggaattatgggagctacaagatgaggtttgggtggggacacagagccagaccctatcaacacctctctccttccgtttctccccttgtctctctctcctcctccccgccatgtctctccatctgtctgtccctccccttgtctctcctccatctctcctgtctctccccatctctcctgtctctccatctctctcccccctctcctgtctctccccatctctcctgtctgtccctccccttgtctctcctccatctctcctgtctgtctccccccgccatctgtctccctttcttagaatcccgagttgtgtccaacgattcggactcggacctagaggaggcctccgagctgctgtcctcatcggaggccagtgccctgggccacctcagcttcctggagcagcagcagagcgaggccagcctagaggtggcttctggcagccacagcggcagtgaggagcagctggaggccacagcccgggaggacggggacggggacgaggacggcccggcccagcagctctcaggattcaacaccaaccagtccaacaacgtgctgcaggccccactgccccccatgaggctccgtggcgggcggatgacactgggctcctgcagggaaaggcagccggaattcgtgtgagctggggtggggctgggaccacaggtggcttctctcttgcctgctcctgtccctccagcacgtcccctgcaccacggcatagcttaggtgcgccgtcctggggtcgctgccgagagcgcctggacttcgacgtcccaccagcgggcgcctcctcccagaggcttccaggagcacgagggccttgcggcacaggactgtgccctgtgctgtcccctgcaccccggctcagctgagctggggaacactgctgtcgtgtgaagtcacagtggccttgttggtgcccacagggctgtgtggatggaggaagctgtccctgcccagtgcatcccccaggtcatcacggggacgcaggaggcaggccctgccctgccctctcctcacaggtctgttgcagggactccagaaaccattctgggagccgtggatgggggcggagctggggtttggtgcagtttccagggtgcagtacagcagggcctgaatactggccctggactcccttttccagaacaccaggtgtggccacctggggctcaggtacacagtggggtctctcggaagccaccgtgtggttctttcacaggcacgtttattttgctgaaataaaaagtttttaatcgggtgttttctgtggcagctgcaagcttagaagattttctgtggcagctgcaagcttagaagaaggggccagggaggggacagagagagccccgtggcgtggccctgggcctccccctaggggagggatgtgtgaggaagggaaccccccgccacggggccccgcgaggtgggagcccgggtggtcttcaccacaggctgtgcagacggtcaggcatcgaatgacctcgtcacgtccacctgcagcccagggcagtccaggaaaacgttctcgatgacggacgtatcccccggctctaaggtttcgcacgtcagccccacatggccaccaagcactggaaacgtggcccatgcgcctgtggaactgcatttttttttttttttgagacagggtgtgaccctgtggcccaggctggagtacaggagcacaatcgtagctcactgcagcctcggcctcctgggctcaaatgatcctcccgcctcagcctcccaaagtgttgggattacaggtgtgagccactgtgcccaggtaatcttaaagttttttgtagaggtggggggtttctctgtgttgcccgggctggtcttttaactcctgagctcaagcgatcctccacttcctgggttcaagtgattctcctgccttagctcccaagtagctgggattacaggcatgcaccaccacgcccaggtaatttttgtattttttgcagtgatgggattttg[144 bp omitted]atgacacactctgtcccctccctcctccccagccctgggaacccccatccccacccaactccccagtcccgggaacccccatcctacttccagtctctgacgactctagtgacctcctaggagtgacatcagtgtttgtccctttgggtctggcttgctttggccaagacaattttgaaaaaagtacatttggagagaaggggaagcactgtccccatcacacacacagtccgcggcctggggatctggggaccctgctgcacagaacagtgggcgcgttacagaccaccgaccgcccgagggtgaattacatcttaataaagctactgtgagagaaccacgtggctaggttaaacttgggcaggcgaggccttctgaaatcagacagtaagcaaacggggaagtagagccagatcccaaacgtctgtaagaggaactggccgcaaaccacagctgcacaagccagagaacaactccacaccctcacgggaagggaagagacagacacgctcacgccttacccaggagcacgaagtgggagggcagggcgagggcctggggagacactgacccctgaagccagcgcgaggagggcacacctgccaggctgacctcgtgtgcttggggtgaggcaaggccacctgctggaaaccttgttagtcggcctggtttctgtatcaagcaaatttatttgctcaaaacatctttaccatttgaaaacacccaacctcctacaacaaccgagaactccagagctggcatctcgcaccctggtggcttgagcgcgtgcatggctgtgaatggagtaaagagccgaggccgggcgggggccgccacgcatcagggcccccgagggagggaagacgaggggtggaaggccgagggcccaggaggaagcagtggctggtgggagacccggaccccaaacccccaacagaggggacccagcgtggtctgggtgaagacccggcaccagctgcccccaggtgacctccctctgggggccttgttccttctgaggctgcatctcgcacaaatccacaggtgaatggggcgggctgggccacaggaagcctcaccccaggacgggagaacgtgggtggaggccacctgccttggggagtccagaggagcagcagccgtgagagctgtgggggccggattctggcagggcaggggcgtttgtcctgcagggatgggggtcgctgtgtgtccgcctctaggggctaggaaagggggagagtggtcacacgacaggggcagatccagtatgcccaggacagcacaacgcccaccgaacgtgacggggtgcgggaggcctggcaggaggcggcccaggccgcagtgcagaggccggacggctcccttgtgcccagcggtcacacaggcgtgggcagtagctctgacctcaaaggaaccgtgccagcgtcagaccaggccaagccccacccctgggctgagtgtgaagtggggcggcctgcaggacagcagctcgccatgaccagagtccaggggaagctgggaggctctcgccatgggcagaggctgtcccgctcctgagactccggccagtccctcccaaggtgcccactcagggaagggttggcctgaagctgtgcctcctctctcagctctggggtctctgggcaggtttctaaaccctcttctggaaagtcccgccgcacaactgccctgcaggtgaacgtctcctgcttctaaggtgggtcagcggcggagagacgcacgccccgcgtaccaggactctcccgtccaggcgcacagccccaagagctgcagcctacggtcgggtggggtctgggggtctgggggtgtcctgggagcgcctggtggcccagctgggctggtgctaggagggtcttgctgccggacaaagcaagaacagccctgcacaccgacggaggggacgacacccctgcctctgaccccacctcagtgcctgtccctcggccgtctcacctgtcaggcggtagctactgcaccagccggtaggtgatgtacctgccagccgtctcactgggccggatgatcttcaccacctgcagagacagagagcaggggctgcgaatgcttgaggggtctcactgcagtcaccagacagcaggcgggcagcacacgggctggggatggccggcaggggtccgagatggctgaccctgggctgtgggacccgctccctgggaacctgggtcacgctcttctctgggcccagtggccctggctttaagagggggatattgggggtgtggtctcgaggtcccctccaggccctggatcaagggggaggggctgtcggggagggacagaagcccccttctccgagtggtcagctcagagcagccccagggccccttctccccacagggctcacctgcccacgctttatcccaaagtagcgcgccacagggtcccccgcctggatcctgggcagctggttctctcggagcttactgcgaagcaccgtcaggaaaatgccagacagggccgttgggggggcaggggtgtgtgtggggggggaacgcggaagtctcgagggacagggaggggcggggccggtggggctggaaaggatactatcgggccagcagctctgtcacctcctccttggtcatgacgacgtgctcagggactagctgccgagagaggaagccaccaggcatcaccaagggctggtgagaccccacgtggctcccaggtgccaccacagcccctgcgccttcagacggacaagagccctgaaccccaccccgatccccggcactcagggagcccacccaccccaccctggctccacaggcgggggacggagtcacagctcctggggcttctgaggcagacgggctgggcacagccacctcctgctgggactcctcctgtcccagcactagggtccctccacactcccagcagtcccgattctacaggctggggtgggcccgggatctgcatttttttttttttttttttttttgagatggagtcttgctctgtctcccaggctggagtgcagtggcacaatctc[210 bp omitted]ggttcggctgctgcaggcccagggccaccctttgagaaccctgtcctccatgcactaataggaacacctgccctgggccccagatcccacatcttcctggccacccacaaacgctgcatctctgccggccccacgcaggcgggattccgcggcgcgcgcccacctcgtgctccgtgatgttgatgagcagctcctgctgcagaaactgctccaggatgtacttgggggccatgtcgaccagggactggaagagagcggctctaaggcacggcccggaggggcccagacaaccccaaccccatttcctgcctcaagctacctggggcttactcgtgtgccccaacaacacacccacgtcgtgaatcagaaaaccccaccgccagcccaggagccttcaacagcccgcccctccccagcctctctgctcatcgagagcctcatccagcagtgaagtggccgtggaaactcggatgtgtttccatccatcacacgcttccaggggcggccctcagagctggcagggcgacctcttccccatacaggggtgctgctctgtgtggctgcgtgaaccccacagctggtgggccagggactaaactgctctgctgactgcccgtcacagcacagcagcctggctccagagtgtccgacagacagacggggaacacggataggcccctggaggaccccgtgccgggcctcctctgcaagtccccctggacatcagctcaggataaagaacctccggctcctggaatctgcaccaggccgagggctggagcccacaggagctggcgagaggcacagtgccctccgccctgacgcccctcctgagagctgggggaggacggcggctgcctggggtggggcccatggacgcggtgggagggaggcggtcggggcttgccggacatcccggccacatcctccagggcaccctggctggcctggcccaaagcccaaggcacgtgggccgcctgtgggtactgcttgcgggaggaggctggggagggggagaggctggcggggtggggcaggggtgcccacctgcttggcggagggtgtcatgccctgctgcaccacgatgagagcccgtgtgatgttctcctcctgcatgcgctggcagtacaccttgatggtcttgatgcccaccttgggctcctctgcagacagagagtgtgctggcctgcacgagcctgggccctcgtggccctcgcccacccagagcccagagcacccaggttccagccccattccacacaggtgtctctcctgctcgggcctcggcttccgcgtttgcaaaacgaggcctgagttgcaggatcccaggacaggggaagagagggctgaaacctctcattcacccggagacagggacagggggctgacacccctcagtcacccagagaccagggagaagcagagaccttcgactctgagaggctcccaccctgggcagttctggggaggcgggtgactcagcaccaacctctccaacaagcagacctcacaccccaggacgctctctttaagaagcatcacctgaggccgggtgcggtggctcacacctgtaatcctagcactttgggaggctgaggcaggtggatcacttgaagtcaacagttctaaaccggcctggccaacatggtgaaacccggtctctattaacaatacaggatgggcgcggtggctcgcacctgtaatcccagcactttgggaggtcaaggtgggcagatcacgatgtcaggagatcgagaccaccctggctaacaaggtgaaatcccgtttctactaaaaatacaaaaaa[131 bp omitted]gtctcaaaaaaattaattaattaattaataaacaatacaaaaagaaaaagtagccaggtgagatggtgtatgcctgtaaacctagctttttgggaggctgaggtggaaggattgtttgaacctgggaggtggaggttgcagtgagctgagattgcgccactgcacactccagcctgggt[148 bp omitted]acctcatctctactaaaatgcaaagaaaaactagccaggcgtggtggtgggtgcctgtaatctcagctactcaagctgaggcaggagaatcgcttgaactcaggaggtggaggctgcagcaagccgagatggcaccactgcactccagcctgggcgacagattgagactctttttcaaaaaacaaaaacaaaaaaaaaacaaaaaaacccagcagcgtcaccaggtccggttggcagacgtgctccgtcaccccactgattaattctgggcgtggggctgcgcccctaaggcgcttgcaatcccccaaccgctgagggctttagagccatactagggaggcagacaggtgcggagacttccgcaaagcaggtgctgaaaccgagggtcccaggggtcctgggaaaagaggcccgagcacaagctcgagggacgagtaccggacgctgacaggggagagggggcatggggtgcggaggaatgggctggggcgggcaggggccgcagctcacaaggaggctgcgctgacccagacggggcctcctgggccaggccaagaagctggaagtgcacccaacggccaggatgggggagccaagggacactagggcaaaggacatggggggctgggggtgagtggggaggcccttgtgactctcctcgttggcaggaagagagaaggggactgagagggaaactagaaagaagctgagcatgagaggggtcagagatcaacggcatcacccacagcaaggaaggggaggggagttttcctcccagactgggcagagagacaaatgctgggcaccaggcgagtgggggtgggtgctagcgaccggctcctcggcaggtgctctggtggcttcaccggaactcccccgggacccgctgctcacctggaaagaacacaaacatctggtcggtggggtcatcgttgtgggccaccagcacggtgaggtccgtgcgccgcggccgcccctcactcggcttgtccccagattgggctttgaactcctccagggtctggtcaagctcgtcctgggtcaccagatagccacggtcgtggcacagctgcagagagaaagaaccagctgaccccagggcagagagaggaaggcggccaaagctcgtgacccggaagtcagacctgcggctgctgcagaggacagaggtgaacagcaaacgggatgaacactcactgtgtgctccatgacagccaccccggcccccacagcctcacaccacaggatgggaccagtatgatcctgagaggctcccagagatgtccagccttgaccaagaccgtctgtccacccagcctcacagaaacctggcagggagcaaagccctccaaaccactttgcagagctaccctaaaggcagggacaaaggcggggcgcggaggctcacgcccgtgatcccagtacttagggaggctgaggcaggagggttgctggaggccagttcaaggatgcagtgagctatgattgcaccactgcactgcagcctgggcgacagaatgaaaccctatctcttaaaaaaaaaaaatgacagggaccgaaacagatgtgacttcaggctgacaatgtttgaggatcggagaaagaagaatcaggctgcggggggcttcgctgaggacaagggcaaagggtgggaagcaagacaaagcaaaagctctcaaacggccccaatggctgaggcaataccctgaaccgcaggtcctcaggcctgtgcccggcttccaaaccggactcgacccagtggcctccatctgccccagaccccaaggcacgggttccgagctccacgtccccatcgaaagccccagctcgcccgctgcttcccaaccaccaactctgccagcctcggatgctgaagactccatggggttcaggacgcaaggacaaatagcgacgctgaatcacagagaagggcagagtctgggggcgccccccgtccccattcgcggcttcctcctcctctcgccgccacgcgcgccgcaccagcccaagccgcccacccacccctaagcaccgcacccagacgtctcgaaaccccctcccttccccgctgccggctcaggtcgggtccagcgcctggtatccccggcgacctctgggcctcccgtatcggcccggcccttcatcgctgctgctccgacgagagtacgaggagacgccgtgctcgaccccacctcgggcccctacacccgccgcccgcgcccccgcccccaacaccaggcgcggctcacctgcatgatggtcttgcggattttccagagccggtacgtctcctcctcgtcgtccatggcagcctccgccgccgccgccgctcgcaccccttctccgcgcgagaacccgcgcggactgcgcctgcgccgaatccgaatcaggccccctccgcctaaccccgccccgcgctggtctgtcgtcggcgaatgcctgaatgcagcaacgtctcggatcggcagcgccaagggcagcccgagccttacgagagcggcagttggctgagcgagtctctcgcctccgtagttctcgtgtgtctttggccgcacagcctctcgggagttgtagtttccgttcaactcccaccttggagcaacagtttagaatcccacgaggcgggggcgaagtgtgagcggggaaactgaggcctggatggggtcaaggggcagctcggctcctagggatggtctgggagcctagtgggaactctataaatatttgtgcatcaaactgtacagggtttcctccattggctcctggccaggtcagggttaattcccttgggcctcagtttccctacctgtgcaatggcaataaagtgtccctactttagacggttaactgagagtcttaggcatctctctaggtgcttattaagtcccctcacctctgtcctctcccctgagcgccaccagcctagcctgggtatctccccagcctagcctgggtatctccccaccccagactcttcctgtctttgcaaacctcctcacttccccaggttcacggagaaccccagcccaacacttcctgtgtgcaggctatcagtaacttattcagtgatgcattcgttaattcaacatttactcagcaacctacagtgatggtgaataaaacaggccaagtatcccttgcattcagataaagacaggatttagtaaaatataataaataacgtggccgggcgcggtggctcatgcctataatcccagcactttgggaggct[134 bp omitted]aaggcaggagaatctcgtgaacctgtaaggtggaggtttcagtgagccaagatcgtgccactgcactccagcctggacaacagagcaagactctgtctcaaaaataaaatgaaatgaaataaaataaaataaataacaacgttagaaagtgacaaagctacggaagaagaaagagcagggaggctaagtgacatggggagaatgggagaactgcagtatcacatggggaggtcagggaatacagtgaggatagattcaagcaaaaatcccattagcagtggtggctcatcactgtaatcccagcactttgggtggccgaggcaggcagagcatgagatcaggagttccagaccagcttggccaacatggtgaaaccctgtctctactaaaaatacaaaaattagccaggtttggtggtgggtgcctgtactcccagttactcgggaggctgaggcaggagaatcacttgaacccgggaggcggaggttgcagtgagccgagatcgcaccactgcactccagcctgggtgacagagcaagactccatcgagaaaaaaaaaaaaaaatcccattgggcgcgatagctcacacctgtaatcccagcactttgggaagctgagaggggaggatccctttgttgtagttttgtaatttttagttgtaagtcacggacttttttacactgatatttgagattctttttggggggctgtcaggggctactttttttttttttcctgacacggaatctcgctctgtcccccaggctggagtgcagtggcaggatctcggctcactgcaagctccacctcccgggttcacgccattcttctgcctc[211 bp omitted]cttttctttctcaccttgaggccaggagtttgagacaagcctaggcaacataggaagaccccatttcttttttgttgttgttgttgttttttgagaccgagtctcgctctgttgcccaggctggagtacagtggcataatctcagctcactgcagcctccgcctcctgggtttaaaggattctcctgccttggcctcccgagtagctgggattacaggcgtgagccaccacacctggctaatttttttgtatttttggtagagatggggtttcaccatgttagccaggctggtcttgaacttctgacctcagatcatctgcttgcctcggccttccgaagtgctgagattacaggcgtgagccaccgcacccggccaggaagaccccatttctacaaaaaaatttaaaaattagctgggcgtggtgggcgcacctgtagtcccagttactcgggaggctgaggtgggaagatctaggatcgcctgagcccagcggttgaggctgcagtgagctgtgattgcgccactgcactctagcctgggcgacagagcaagacactgtctccaaacaaacagaaaacaaacaaaaaccagaagaggagagggaggaaacctggggttgcctggggatagctgtatcaggcagacagcacagccaggatagaggctctggggctgtgcctcacctggagtgttcctggcagggaaggggcaggagggggtcagagggcaaggtggggcaggtcccatgaagccttgctggtcagggtaaaatgtctggagctgctgtgttgggaaatgactgttgggagccagggcagaagcaagagaccagggagggagtgggaaggcaaacttgccacaggttggggtggctccaactacggtaggggcaagcacagagcggggagggtgccacagggcgagaaaaagagggagaaagggaacaaagctgtccctgtgagcagtgaaaagaggggtgggagggtggaggcgtgtaggtcgaggtgagctctggagttcagggcaaggtctgggggatggacgtgcaggcagggtggccacgtggtgaagattagagccgggagcctggaccaggtcctgggagcagagcagagtccaggagagtaagtccagccctgctggtgttcagaagcccggagaaggaggggaggcagcagcaggaggggagggaggctcagcacagacactggagcagcccctgagctgcagacctggctgtgtgatctcaggcaggttactcaacctctctgtgcgtcccctctcccctcccttgtaaaacagggacaagaacagcacccacttcgtagggtaattggctaataattgcaatgtacacagagtggcgcctgacaccagcactgcataagtgttccctaaataggataaagggcaggaggttgccaggtctcctggaaacctggtgaggaaggtgtctaggggcagagggaagggagtggctatgtgatgccaccgccaagtcagcctgaggactgagcagggattcgcctagcagacattgcttgtgactcagggaagggggccagtgcctggcaggacggatttgagggaggagaggaattggagatgtggggcagatacatggggcggggagggtcaggagacggacaggcctcaggagtggattttatgacacaagaaagggcatctggagtaaagaccaagcagtgacctgcaaatctgggggcaggggtggactgagaggctgagcccaagccaggggcggcctggatgataacagcaaagccagaggcccggaagtcaggccatgatccacacacagggcaggtgaaaatgtaagatggtgcagccgctatagaaagcagtctggtcggccaggcgcagtggctcacgcctgtaatccaagcgctctgggaggctgaggcaggcggatcaactgaggtcaggggttcgagaccagcctggccaacatagtgaaaccccgtctctactgaaaataccaaaattagccgagcatggtggtgcaggcctgtaatcccagctacttgggaggccgagggaggagaatcgcttgaacctgggaggtggaggttgcagtgagccgagatcgtgccactgcactccagcttgggcaaaaagagtgaaactccatctcaaaaaaaaaaaaacaacaaacagtctggtggatcctcaaactgttacacaaagagtcaccatatgactcagcaattccactcctaggcatacacccaagagaaatgaaaacatacgcccacacaaacacttgtacggctttacaaactcaaaaagagaaaacagcccatagccgggcatggtggcgcatgcctgtaatctcagctattcaggaggctgagaaaggagaattgcttgaacctgggaggcggaggttgcagtgacctgagattgcgccactgcactccagcctgggtaacagagtgagactctgtctcaaaaaaaaaaaccccagatgtccatccacagatgaataaataaacacaatgtgatccctccacacactggaatatttctgagccatgaaaaggaatgatgaggctctgacacaggccacaatgtggatgtagcctgaggacctcatgctcagtgagagaagccaggcacaaaagaacacgcagtgtgtgatcccatttccatgaaatgtccaggacaggccaatccacagagacaggaggggatgtgtgtgtgccaggtcctaggggaggagatggagagtgaag[143 bp omitted]atggagaaaccctgtctctactaaaaatacaaaactaactgggtgtggtggcgcacgcctgtaatcccagctacttgggaggctgaggcaggagaatcgcttgaacctgggaggtggcagtgcagtgagctgagatcgtgccactgcactccagcctgggcaacaagagcgaaattctgtctcaagagaaaaaaaaaattctggaactagatagatagaggtgatggtctcataacattgtacacgtcctaaaaacactgaattgtacactttgaagtgttaaaatgttgaatttcatatgtattttgtttgaatttcaaaaactttttttttttttgagacagagtcttgctgtatccccccaggctggagtgcagtgacacgaactcggctcactgcaacctccacctccagggttcaagcaattctcctgcctcagcctcctgagtagctgggattacaggagcacggcaccactcccagctaatttttgtatttttagtggagatggggtttcccc[136 bp omitted]ttggccaggctggcctcaaactcctaacctcaggtgatccgcctgcttcggcctcccaaagtgctgggattacagatgtgagccaccgcacccagccaaaaagttttttttgagacggagagtctcgctctcttgcccaggctggagtgcggtggtgcgatctcggctcactgcaagctccgcctaccgggttcacaccattctcctgcctcagcctcccgagtagtagctgggactacaggagccctcgac[137 bp omitted]gcctggccaaaaagatcttaaaaaagaaatgaagccacaggacagcccctccccagtccttcctggagccaggggctgctctagaaagatatgtggcaacacagcttcctgcagggacactcaagaacttccgccctcacagggctggagccttgagaggtccccgagactccatttccccgttcgtgaaatggggacactctgggaaaagctgtgaagcccccagcacaaatctctcccagagcctggggccccgttctcagatccgaggtcgcgaccccgtgttttccccacttctgactttatcacaattggcaggaagtcaggaatgggatcaagtctctccgcggagctgtgggtgctgagctgtttttctggcaaccctgaaataaactcccatttcagtgcacatgtttgcaacaaacttaaggaaaacaacaccggcaaaattgcgaacagctgagccttcgcaagggcaagaacagagtcaccagtgtggccctgtcacccggcactgccagggcgggaggaaatgggggggtttcctgagaagtcagacaatgggagttgactccaagaactcagcctctaggggctgggcgggagcaaagccatgtgaacagacttatgcaagaccaggattcggccagccctgctcagggatccttgcttcactgcctctgccaccaaaccatccatgacgcctctgtgctgcatctggcaggcctgagtcgggggcagtggcgggggcaggctcatagcaccccccaagtcaacccggccctgagtctgtctctgaagaaatactcagtgcagggtcagaaaaggttaagacctt[132 bp omitted]gaaagcccgtatctactaaaaacacaaaaattagctgggcgtggtagcacatgcctgtaatcccagctactcaggagactgaggcaggagaatcacttgaacccggaaagcggaggttgcagtgagctgcgatggagccactgcactccagcctgggtgacagaccaagactcctcaaaaaaaaaaaaaaaaatccaaacccctgcctgtacaggggtcaaagtccaatcacggtgactcagttcccaagtatgagatgagtgtttctgttgccacatgtccaagccacgaagtgaaaaacagagttggaagccaagatgtggggcagtatgggctcgggtgtgcccataccttgtaatgttagaagtgtaagaaaaccctccagacttgtgtttattttctgagcacataccgcgcgtccctgcgtgggcagctgcccctgggggtgggagcccaggaaactccaggttctcagttaagtggtaactgtcttgatgactctcaggtctcagtgcccacattatacaagcggctcagcaaccagacccaggatggggagtcactgaccccctgcgcccatggcaggggtgagggtagggacacccccataagatggagctgtgatgagaagcaaacccaactcagtttggtttcatttacattaaaaaggcaaatcccttggccggatgcggtggctcacacctgtaatcccagcactctgggaggcct[136 bp omitted]gagtcaggagaatcgcttgaacccgggggctgggtggaggttgcagtgagctgagatagcgccactgcactccagcctgggcaaaagagcaaaaaaactgtgtctcggaaaaaaaaaaaaaaaaaaggcaaatcccggccgagcctttggctcacgcatgtgatcccagcacttttgggaagctgaggctggaggatcacttgaggtcagaagtttgagaccagcctaggcaacatagcgagacccccatgtctacaaaacaataattagccaggaatggtggatgagcctgttgtcccagctactcgggaagcagagacgggaggttcgcttgagcctgggaggtcgaggctgcagtgtgccctgatcgtgccactgcacgttagcctgggcaacacagcaagaccccgtgtcttaaaaaaaaaaaggtaaataagagttggggacacttttctgcgagttggagaaaccaaaccccctcgacgagtcttaagtagtattctcaggttgtctggcctgcggccgcgctgctgtcaaccagccggataactgcgctgcctcccgacgcgccgccagccaggccacggcctcctagacacaagcgagcatgcgcagtcgccaacaacaagtccgcacgtccggtcccgcccccccttccccgccttcttcccactccggcctcccattggctgacgtcggcgcgagcgctcaacaccgacgcgtctgaccaatgagcgctctggagggcgtggccgtgggaaaggaggcgcggaaagccgacgcgcgtccattggtcggctggacgaggggaggagccgctggctcccagccccgccgcgatgagcctcggccgcctttgccgcctactgaagccggcgctgctctgtggggctctggccgcgcctggcctggccgggaccatggtgagctagcgccgcggccgttgccggcccggtgaccgttggggcgggcgcgcgatccctgcctccgctcgccggcgtggggaaccctcaggctccagtgaccttggtggggggcgtctgggggctccccctccccacccccggccgggcacggacgcgggtgaccgtactgcgacgcgctccgcggccctccaggccgttgtaggcgcgcgggctggggtcggggaaggggaaggggttgttccacgcgcgcgggtcgtggtcggggaaggggccgtccaggccgttgcaggcgcgcgtgccggggccggggtcgggggtccaggcttgcagggggcggggtccgggacggctggggcggagctggaccgttgagggccacggcggggcgtctccgggccgagcggggctgctgcgcccgagcggttgggggcgcggagggctggaaatcccggatcacgcgcccccgggcgccgccccgcccccgcaccttggcctagcgcggtggcgtcacagtcgcgcagtcctgactacggcctccgggccctttgtccccgctagcggcgctcggggtgggggagccaggaggggcgggagacgggcgggtatgggccgcgcgggcgcaggctcccccgggcgccgcaggcagcggtgccagagccggggcaggcggcggccgcgagcccctcggcggcggaaggccccagcgtgcaggcgcaggagggcgcggcgccggcggaagaagccctgtccccgcagcttgcgaccggagatccacgaatgtcccaagtcccaggacccggtgcgcgcggggcccccacaccggctaatgtggcacattttggggttggaaccctctcccggcctccgggtctccggtaaaaccggaccagaagtacaagggggcgtgtgcgtttaaggaggaggagcgttcaggtcttcagggccgcagggcctcggtgtccccgccaccgacccgctcccgatcccttcctgcctcagggtcccgggctcagcctcccgtccacgctccctgctcagcttcctttgccttgcagtgcgcgtcccgggacgactggcgctgtgcgcgctccatgcacgagttttccgccaaggacatcgacgggcacatggttaacctggacaagtaccggtgggcgctcgcctggggtggggcgcggggtcgggccctgggagggggccgtgttcttctgcgctgacgccgccgatcctcgcaggggcttcgtgtgcatcgtcaccaacgtggcctcccagtgaggcaagaccgaagtaaactacactcagctcgtcgacctgcacgcccgatacgctgagtgtggtttgcggatcctggccttcccgtgtaaccagttcgggaagcaggtgggctgctgcgtccccggggcccgcagaggcgggtgggtgggggtcggggtgggctccagcctggagagggcctgggagtgtgcagggggcccggactgagggggtgccagcccccgactcactcacacaccttggccgccacaggagccagggagtaacgaagagatcaaagagttcgccgcgggctacaacgtcaaattcgatatgttcagcaagatctgcgtgaacggggacgacgcccacccgctgtggaagtggatgaagatccaacccaagggcaagggcatcctgggaaagtgcgtgacctctggggacagtacggctgctggggtgggggtgggggggctgctgggatgctcacacctccctggggcagaatggctcatggctcggggggcggttgcggggaggtgctgggactctcacatcgcgtggcctcctgggggtaagatggctcagggggacatagagggctgtggaggcagccagggatgcccacacctttgtggcctcctggggacaggatggctcgggggcctgtggggggctgttgggactctcacactgcatggcctcctggggtaagatggctctgggggggcttgggggcactgtggctgtggaggcagccggggaagctcacacccttgtggcctcctggagacaggacagcttggggactgtggggggctgctggggacgctcacgtccatgtgcttcttttccagtgccatcaagtggaacttcaccaaggtaagggggctgtggggggtaggggaccagcttcccctggccacagccgtggcccagatgggcagcggacaggaagggcagcctcagccccttgcaggggtggccccacagtttggacaccgtctctccacagttcctcatcgacaagaacggctgcgtggtgaagcgctacggacccatggaggagcccctggtaggtcctctctagggagcccgcttgaggctcgggggcttgggaggtagctgccctaacccagctttcctccccgacaggtgatagagaaggacctgccccactatttctagctccacaagtgtgtggccccgcccgagcccctgcccacgcccttggagccttccaccggcactcatgacggcctgcctgcaaacctgctggtggggcagacccgaaaatccagcgtgcaccccgccggaggaaggtcccatggcctgctgggcttggctcggcgcccccacccctggctaccttgtgggaataaacagacaaattagcctgctggatctttctgcgtaggggcttggggggcccttttgccaggggcccctccatgtcagggccagttgccgtcagctgccaggctgggggtgccatggaggtggcgtgttgttgccccctcttcctccaggctcggggggctgtgctggctgcagtgctggggtgcagtgagatctgggcccgttggacacccagccctggctcttaatccgtgcagccccacctgctgtgcacaggcagggcctggtgtagtgccgagtcttggaggagataattctaagtggctgtgcttcctggccccgggccttaactgttaggaggtggctactggggcctcccctggccaggaagcagaagtgcagaggcccgaggaacagcgtggccctggtgctggggatgggttgggcacccacaccggcccttggggcctcacctggctggggggtgtgggggtggctgggtggttactgtttgcacagagtccctccgtgagggctggggatggacaggccaggaggggctggtagagcagtaccagccaccgttcatgggacccgggggctgtctggacacggcctggctgcccacctgcacagctagagggactgcagcctgccagggtggctgatcccagctgcccccactgggggtctgtggaatggacggtccatggcacctgccccagacactgggttgagaggtctgtctctcccagccctcgtcccctctcatccacatggggccagcacaggcagtgggcagaaaggcctggtaaccaggagagcctggggggatgcccacacacccctgcccttccctccctgtcccacaggctgaggagcagactccgtgggaagtaggcaaaaggcacatatatttaaaaaagtcctttacatatgtacatcagaacttgctataaatacatagaaaccgcaggcgccaccctgccagctccgcggcctggggcctgggagaggtgagcgggcaataacttaggggtcagggaagggctgggggagggagaattgcatatattagcaggggtctgccccacggagcccccgagacgcggggccctgagcacctggggtttcctgagtttctagctcttgggaccacccggtttcacggatttcaagggtttgggcccactgagcccttgtgggtgcccagtcccagagcagccacccggagccccttcctacttgggaggagaggcacagagagggccctgccacgccccggcccccagctgtcctgagtgggccccgccagggctgaccaggtgggggcccgggtcgggcgctgaaggcactgcggccagggcctagggctcctctgagcagtggtcaggggaccttggccctgctccccaccgctgctcctaggggagaaacggtccctgtgtcttggggcatgtttcgcctaaaggcgtgtcagagaggagcctgggcgccggggaagggtgggctgaactggatcacgctctgccgctcgggaccaccgcccgccgcgccccccgcccccgcgccctcccccagcgcgccctcggagggcggccccgcgtgcagcgagcgcagcatgtcctccagcacctccttgaagttgatgtcgcagccctggtgcgcgagggccgcagggtcggcctgggcgtcgggggtgcccagcggcacgacgccggggccggcgtccagggacagcggcgccgggaaagagaagtgcgggggcggcgggaaggcctcggccggggggctgtaggtgaggtccagcacctctccggggccgcaaggcagcgccagcgggcgcggggcgggcggggcggggcagcccagggcgggcgcctgcctgcgcttcacgtccgcatccatcagccgcagctcctgcagcacccggcgcacgcagccctcggggatcttgatgcctgcgggcagagcgtcggggtcagggccggcgctgggggctcgggccttcccggggcgcccgccgcccactcacccacttgcttcttcctgtccttggtcttcagccgcacgatctgcaggtagctgctgctgctgacgtcggccatgacggcggcgatgcggccccacacgcgcagcagcgcgccgcacagcatgtagtggtgccgcagccgcagcccctgcaggcagtccttaccctcctgcgccagccggcagtgccggttcctgcggacgagacgggtcgtctcggctcaggcgggtcccaggggcccgcaggctccccaggtgccctgagatctcccgcctcctctcagggtctcgggagcccccgatccccgcctgggtcgccgccatctgccggtttccccctggtccccggcccgccctcaccaggcgctgtggctgcagtgcgtcagcgacaaagcgtagccactctcccagggctccttggcctcctccgcggtgacctagggacacagggccgcatgagcctgggcggggtcagggccggcaacccgagcgaaagctgcgcccggcggccgcctacccggtggaacttgcggcggaggctgtccagggcctccagctggctctgccggccgatgttgggcttgtacaccgtgaagaactggccgcggttctgctccgccagcaggcagctgggcttgttaccgcggacctgcggaggggggcgttgaggccgcgccccggtccgccccccgcgggccctcctctgggggggtaaccccgcccgaccccaccttgtaggagaggtagaagccgtcataggggcccgtcagcgccagcgacttggcaaaggcgtcctcccacttcaggccgcggtccacgctgatctgccacggcacggggtgggggggtgtgagtgtggtgggggcggggtgggcagagtgtgaggggctgtggggcttcctgctgaccttgtagaagaccacctgcccgtcctgcgggtgcccgggagccaggaacacctgctggctctcctcgtagatctcctcgataccgggagcaaggtctaggggggcgggtggagggtaagtggtgtccaggcctgggactgtgggctggggccagggtcagtcccgtagccggggcgcaccctagagacgaccccccgagagcacaggagagggtgtcctggatcctggcctgacctggcccagcgtggggatggtgcacgtgggccccaacctggcaaccgctcaggtcctaggtaaccccgagcaggctgtgggggatcgtgggagcctgggggccgctcaggtcctatgtaaccccgagcaggctgtgggggatcgtgggagcctgggggccgctcagatcctaggtaaccccaagcaggctgtgaggagattgtaggagcctgggggctgctcaggtgctgggtgaccccaagcaggctgtgggggatcgtgggagcctggttggctgcggcactgctcatgagtgaagtagccatggcccggacccgaccctcatctggacacagggaagtggtcctgatggacaggcctggccccatgaggctggaagcacaggctcgccggcctttcgttcacaacaatgtagcaggtgccccgtgaagcctggggatgagcatggtgggcagcgtgcaccagcctgggcaccttccagagacgtgcacggtgatcccacgagccctgtgcctgcatccgcccagtctcacccagtaccctcgctcacccaggatgcatggcgcttccacgagccccttgcccacctaggccctcgccgtgctcacccacaatgcacggtgttcccacgagccccgagcccacctgggatgcccggcgttcccacgagcccctcgcccacccgggatgcacggtgttcccacgagcccctcgcccacccgggatgcccggtgttcccacgagccccgagcccacccaggatgcatggcgttcccacgagccccgcacccacacccacccacaccacaccccggcacctgtgctcacccaggatgcccatgtcgtatttgccctcccgcttgtccatctcgatgaggtggtcgaaggtgtctgagaagtactggaacagggcgttctgcttgtgcacctccagccccaggatgcggttcaggaacttggtgatggaacagtctggtaggggagggagccaagcctcaggctgcgctgggaatccctctccctgctttgctcaccacccgaggccaaggttgcatgagatgagagacaggagcgcctctgggcctgggtgtggggcactcacccttctccacgtccaggcagccattccgggactcccggccaccaatgcccacagacagcaggccctgcttcatgtctgcggggagaggggcctcacatgctggtcttcccacccctgcccctccctcgaagcccctagctccttttccagagaccagcagctccctggggggctggggagcagctgcagcctagggccagggccagggccaggagcggagccttttgcctgacttacaggagtgagaacagcatgttcttggggagtaaacccaaaccccaggcccctcagctgccctggaaacccacccggcagctgctgggggccgccttggctccctttgccttcacagccctctctgtccgtgtgtggggaggggtcactcaacacacaaccggcctacaaagcctgctgccccagctgctctggagcccagtgctctgcaacccctgcccctcccaggaagacccccaccagcccagcttaccccggaagaaggtggggacccctccagggtatccctggggcacaggcactttgttctcagtctggctcaggatggtggtgaggacacagtgcagggcccgggtgccatactagggggagaaggtgactcggggaggaggcccagggaggaggctggctttccctggacccctgcctccccagaaccccaccctcccctaggcccctggaccctgccctcccctagactcctagaccccacctcccccagctctcagccacctcctccccgggggtcctagactgggtcctcccccagacccctggatgccacctccctgagcccctagaagcccccttcccccctgggggtcctagacccggccctcctccagaccactgagccccacgttctccagcccccatctaccccctcccccaggctcttagatccggccctccctagacccctgcccctgccccgccccccaaccctgccttccctgcagtaccttgttctcaaagttgtacttgctgaggtcacgggactccgtggcgcggcggtctccgtgggtcagggccccctgccaggggtggggaggccatcagttggtcacctggggtctggcctctagcaccccacaaagctttggagagccttcctgggcctgtccctggttctcagccccacccccacctgctcaccagactctccaggcgcttggccacgatggaggcgaaccggcgctccccggccagctccgagatgaggaagacatactctggcgcggagacctggttggaccggtgggtgcggcctgggggcagagctgctctcagggcccggccaggcgggggcggggccgagaccatgttgggggcggggccaggcagcgctgggggcggggccggactcaccgaactgctggatggcgcggtcggcgctccacggcagctccaaggtcatgtgcacgcggcgccgctggttctggacacggcggtcggcttggagggagacacccgagctggaggcctccgagatgatggccacgagctagggggaaagaaggggccgggacacggttggtgcaaggcccgccccagcgttgccgccacctcctcacccactaggcccccgctccaggtcaccaggacgtcccggggcagcgagaggcctgcggggcgcggacaccacccgccacacggccactcgcgcccgcacctggcacacacacactccagaagtgcgcgggtccacagtccccggggacccttgggcccctctgtgcctcttgggtcccgtgggccgcgcccagtgcactgcagccccgcaccttctcgccgctcatgaagcgctgcttctccctgaggttcacgtggtcgatggacagaccctgctctgcccgcgactcgaaggccaccgtcccgtcgggcctggacaccacgcggcctttcctgccggtcatctgcagccgagacagggacaaaaccggccgtcagtgttgtggcctcgcaggagtctggccacccgtgtctcagcttccctatgtcctacagtggtcatgggctcccagctgtgcacgggaggtgggggtgctgggaaagggagggcgggactgctggacccaggcgatgtgtgcctgtccaaggcctggtattatcagccagccggcgccacgaagtgaaaaagtgaagctgggcgggggcagggagtaggaggccgcagaaccaggcccaggggcttgtgtcctggccctgggcaccccaaggggtgcgttcaggcaacgatctaagcagaggcctgcgcaggccaggctgggggatctggggcttagagggatggggcaggccgtccacaggaggtcgtggcctcccgggccgagctggacagcacgctgctgccccagggctccccaaacgccccctcctcgcagggccgcggagacgcagagtgaccagcaggggccaccagagctgcacacagcctgcgtgaagccccacccactgcccatgccccgcccaccacactccagctgccacgtcccacccacctccgccacccgctgggggccgcccagctggtcgatgagctcgtccagggtgttgactggcagttcccggcccagccgccgcactttgtccagcagatcctgcttcagccgctccacccgctccaggaccccggggccatgcgggtctctctgcaggaggcacaggggtcctagggaggaggtggagggtcagggcaggacatgttggctgccttctagggcccacctaactcaaggctggcccctggagggcaaggacaaggggcccggggcaaccctgagggacggcagggtggcggggaagcccggcaccgtggcccaggactgcttttctgcacttgtctccctgagaccagctggggcgagactaagcctcctgtcgcggaccaaacactgtgacctcactgcctccacaggggtagggactgcccagccccaagccccagctctgcctctgaccagtggtataacccctgacctcccctctctgggcctcagtttcccccatctgtaaagtgggcaccatagcagcagctgggctcaggtgggctggactgagggctacaacctggggtgggtggtgaccgccaggaggccgggggagcctcaggctggaatcctgacccagaggtggctgctcagcctggactggaatcctgacccacaggtggctggccagcctgggcaagccctcaccccggtcgtcactggggagcccgactgcatcaacgatgacaacgtcgtcatccaccagggactcgggggaggagttgaagtcgctgtccaggccagggtccgactccgtgctgctgtcgtcactgatgcggatgacgcccgctgtctcgcacgccagccggggggctttggccccgcgtccccgaggtcgccctgcagggaaggacagggtcaccgagggccagaccgcagcaaggtggaggagcaggtggaggagacgcagcaggacagagcaaggccagtggtccgagctggggaggtccatccgagaaccccctgcctctgggcaagcagctcagctgttctccagggacgccctctagggaaccccgtgccctgtggccaggagggtacggtgtggggggccatattttatttatttattttcttttgagacggagtcttactctgtcgccaggctggagaacggtggcatctcactgcactctctgcctcctggattcaagcgattctcctgcctcagcctcctgagtaggtgggattacaggcgcccaccaccacgcctggctaatcttttgtattttagtagagatggggtttcaccatgttggccaggatggtgtcgatctcctgacctcgtgatccacctgcctcagcctcccaaagtgctgggattataggcgtgaaccaccacgcctggcttatttatttatttttgagatggagtttcactctgttgcccaggctggagtgcagtggtgcgatctcagctcactgcaacctccacctcccgggttcaagcaattcccctgcctcagcctcctgagcagctggtattacaagcatgcaccaccacacctggctaatttttctatttttagtagagatggagtttcaccatgttggccaggctggtctcaaactcctggcctcaggtgatttgcccgcctcagccttccaaagtgctgggattacaacaggcgtgacccactgcacctagccaatattttatttttattaatttttttgagacaagagttttttctgtcacccaagttggagtgcagtggcatgatctcggctcactgcaatctccacctctcaggttcaagcgattcccctgcctcagcctcccaagtagctgggattataggcgtccaccaccacgcccagctaatttttgtatttttagtaga[154 bp omitted]aggcctggccagtatggtggacacgcggggtgcctggggaggccacacaccagacttcgacaggcagctctgggcttccctgtgacagaagcctgggggttatcaatgggctccccaagggaccgtggagaccctgaaaacggaaggtgggaggggtctcgctcagcacccgcgtccgtgtcccgccccccgggtctcgctcggcacccacgtctgtgtccttcaggctgtctgttgcttcctcttccctaagcgttccatggcagggtccacgcaagacctgccactggcagcggagccttgagcctgcctggcacggacaggacctgcatttggctgagtggacgggggagtgggggaagcagggagcgaccagccagcccccggggggagaaagcagaggggcaggggtgggtggggccatggggggcagggcttacgtttccgcttgctgcccgctcctctgtcccgctttctcttggtggacggaaagtgcttctgaattagcgacaggaacacgcctctgaaagtgagacgcggagtttattctcacacgaggagctgaggccaggcggggttgctctccaggagctggacgcacccctgggtccctgtgggggtcccggacaggaccgggcctgggcagagggtctcctgtgtggagtgggctggggaggactgggggctgcctgtgagctctcctctggcctcctggtgtcacagggccacctcggccaccaggcttcccccgctctgaggaatgtggccggatatgatgatggctcccaggacaggggcagggggcagggtgaaggggtagctgggggcattggggagctccgacccccaggcaatggggggatctaggggggctgctgtgaccctcccggggcattctcaaccaacaggggagaggctggggcttcagacagctgggagggccagcccctaaaatccacagcccccttgttaaaacggcacagatgcaggaagcctccttctgagacccctggagaccatgtcccaaaccttccaggcccaccatgcctggggtccacctccaagcctctgctttagacctggagcagcggtgaaggcctctgtggctgaggctgggggcccagcaaagcccaccccagcacctcctgctgctggggccaaggggcagggtcaggccacaggtggccacagagaggggtggccatgagcgcaggaagcccacagtcctgtccccaccgtgacacttactcagcggccgagacgaagcagttgaggtgcccatcgttctcccccagcacctcccgcgtgcgcgcctcgcccgtggactgcagcccgatgaccacgcactgtgggacggcagaggactgtgagccaccagccctgctgtggggcctctgtggggccagaacctgccaggcctggggtgatggccacatccctcactctgctgctgtgctcgcctccccaggaggggccacggcccccctacaacacacactgctgggtgggggtctgccggctgcctgtctcgggatggtgagctgcccactgtgtggtcacactccgctgttctgacaccctggctggctctgattggaagacggacatccgggcgtctctcacccaccagggtgcagcccccgcccacgtctggggaggggccaggaaggacctggaagaagagcagcctccgcccctgcaggcccggccgccctcagccctcgaaggccgcagccgctcaccttgtctcgcgccagctcctctcgggccagctccaccagccggcgcaccttggctgcgatgcacagatacttgaagaagcgctggtgtgccgaccagaactggccccacagggacttgcgcgactccaggccgatccagtcggccgcctgctggaacacgttcagggcctcggcccactgcaatgacacgtcacaaggcgcccctgagctgtggctcctggctcccgacccgggccccggcccacctgccgccagccctgggcaaggcatccccacgccaggtggaatttagggcaggatgggggtgctgggggtgtgcactgtaagaggcactgcctctacctgtacggcaaaaacctgaaaaaccaaaacactcgtggtggggaagccgtgctgcaaactgcacagactccgcgcccgcggcaaacaggctcagctccttccaagaacacagggtgctcgcagccacgcctctcttgctttggaccagggtctcacccaggtgtgatcctgtccaggggacactgggcatgtctggggctggctgtggtggtcaggtttgggggctggtcccggcatgactgggtgggctgggttagggtggctgggactctggccacggatgctgctccataccccaaagtgctcaggacggccccaccccggagagcaacccggccctgggggttacgggagatgctggttgtgtcacctaaagaaacgagtgaagaggctgggtgtggtggctcacgcctgtaatcacagcactttgggaggctgaggcggtcagatcgcctgagctcaggagtttgagaccaaccagcctgaccaacatggagaaatcctgtctctaccaaaaatataaaattggccgggctggtggcacatgcctgtaaccccagctacgcgggaggctgaggcaggagaattgcttgaatctggtaggcggaggttgcggtgagccaagatcgtgccattgcactccagcctgggcaacaagagtggaaaccccgtctcaaaaaataaaaaaaaaaaaccatcgaacatacagggctgttgggcgtgagggggagaaaacaggacctgtccaaacatggagggaacgaccaagccacatggcccacagcaatgtggatgctgaacacggctaccaactgccagctgtgggccaggacctgggggcaaagggcttgggcaccacaggaaggggggcggtggtttggtcccatccctcgttatcacagccacataaaaaccccagtgatggccgggcacgtggctcacgcctgtcatcccagcactgtgggaggccgaggcgggcagatcacttgcggtcaggagtttgaaaccaacctggccaacatggagaaacaccgttctctaccaaaaaatacacaaaattagctgggtgtggaggcgggcacctgtaactccagctactcgagaggctgaggggggagaatcgcttaaacccaagaggcagaggttgcagtgaactgagatcacaccacagcactccagcctagatgacagcacgagactgtctcaaaaaaacaacaaaaaaaaaaccccaggacaggacagggcgggccgtcacctgatgacgcctgtggcatctgcaaggccacgggggagcaatttcacccgggaaacgcacaggggtccccgggtcgggtgcgcaggctcaccagcagggccgcgcggttgtagacgcactcgaaggctggggccagcgggatctcctcgatgcggaaggtgacgccggagaagctgagctggcgtgcgatgtacatgccgctgaccttcatgtccatggccacgatctccatggcgccaacgcccctgcggatggacacagcccccgtgagcacggccagagcccgtggggatggagccactcggagcgcgaggcagagccagtcgcagagagggcggggtcggcaggagcagagccctggcggccactgaggcagttggcagctgagcctggcggggacggggcaggaagggctgcggaggggctggcttccctgggagtgctgggcagcccgaggcagtgaaacgagcgacccacattcagcacctctgggtgctggggaagcacacgtggcagtgccaggccttgggctgatgggcctgaggcctcctccccaccccccgccgcccctccacgtgggtgagaagggcactcacctcttctcgatggcgtgcaggaactcctcaaagttccggaagggtgtgccctcgccccagatacccaagcggctcatgtagatcatgttccgaggctcagaggcacctgtggggggaagctgccgtcagctccccaacccgggagggcccagaggccgcgtcaggggacgactaagttgggaccacccgacgaggggccctgcggggttggagccatgggcctgaagagagccagcgtggccttgggacaggcgcagaggtgccccagtgtccgaggaggagcagggtgcagacggaggctgagtacgcgtgtgggataccccttcgcggggacagccaggcagaaagacgctgctgcgggtgggtcacgtgggatccgcaccgccccacctgtggcgctggcgtagaccacgcgggccaggggcagcttgttctgcaggtctagcacagccttgcccatcttggtggagccggcattcttggctttgtgacactcgtcgaacacgatctgaggcacacgtgggttaaggagtattctgaaggacgggggcgaccccaggagcccaggtcctgaccacccaagaccccaccttcctggtggggggcaaacgcctgtgcggctgagaactccacgagggaagcccaggtcggagtggcagccggctaccatggggggcgggcgggcaggcggcccccacacgaccattagatgggtgtggcctgggatggctcctcccagactctaaacaacacacaccgaggatggggcctccggcgaggaagggtgggatccctaaaccatgatatcgcaggacgttgccatcggaggaggatacctggaacctgttttcttttttgtttgtttttttgagacagggtcttgctctgtcacccacgctggagtgcagtgatacaatgtcagctcactgcaacctctgcctctcagattcaagtgattctcctgcttcagcctcccaaggagctgggactacaggtgtgtgccaccaccacaaccggctaatttttgtagttttggtagagacggggttggccgtttggttggccagataatctcaaactcctgacctcaagtgacctgcctgcctcagcctcccaaagtgctgggattacaggtgtgagccgtgcccagccctaattctttgtttttttttgagacgaagtctcgctctgtcactaggctggaatgcagcggcgcgatctcagctcactgcaacctccgactccctggttcaagcgattctcctgcctcagcctcctgagtagctgggattacaagtgtgcgccaccacgcccgggtaatttttgtattttcagtagagacggggtttcaccatattggtcaagacagtctggaactctttttttttttagatgagacacagtctcgctctgtcgcctgggctggagagcagtggggcaatctcggctcactgccacctctgcctcctgggttcaagcgattctcctgcctcagcctcccgggtagctgggattacaggtgcgcaccaccacgcccagctaacttttgtatttttagtacagacgtggtttcaccatgttgtccaggtggtctcgaactcctgacctcgtgattcgcctgcctcggcctcccaaagtgctgggattacaagcgtgagccactgcacccggccaggttcttaatattttaagacgaaagaaagccaagttccaggaaagcagtctgaggaaggaaaactgggagaatacaaattaaacggccggccctgccgccacgtagcagctcagcgaggtatgatctcagggttatcgctatttcgtagattgttgcacatagattgttcagccgggtgcgaagacaccagcagtctcccgttctgtttctggccagtctgaatgttctgtgtctcggcgttaactgaacagcaaagccatggccatgtcctgtgcatgaagtggatgctgcaggccaacgtccctcccttatctgagcctgtgctcccaacaccccaacacccaaggtgcaccctgcagggccgagcaccagggctgagcctggccaaggggtgccctgccgtgcctttgctgctaactgtcctgggtctcctgtgggggagcccctccgaaccgcagcctgccgacgagagccctgggatgctggggagtgaactgtgcccaccacactatcagctggggttggcaccttcctgacttggggagcagctcagtggccaccctctgcccacggcatcatggcaaacatcaggaccacatctatggtcactcatcccacttatcagaaccaagaaaccaagccggagccctgtggtgaatgatgatggtcacttgtgtggtacccacagggccagcctcccaggaccagaaaagtcttctatccggagtcctaaaccctgagcaaagctgggggctgggtggccacatccagggtagtgagctccagtggcctccagcccttccccagccccacccctccgctcctaccctctcccatcctgccctcctctcccctgactcccacccctcctctcccactcctccatcctccttttccctccgaccccctaatccagccctcccctcccgattgcccccagcaggatacgacgccctcgaaggcctccccacaccagtccaggatctgccggaggcgagtgcggtgctggccgccggcctggctctccccaatcagggcggagtaggtggcgaagaggacgccctctgaggtagtggtgtcaccgtacttgatctggggatgcacagaacaggtgtggaatggggccccggctcagcaggctctggacctgggtctccctatctgtaagggtgctgggcagagcctgccctggctgctggcccacccagctgagcagcccccactttgcagggcacggtccccaccttgccccctactttgccgagcacagcccctaccttgctgagcgcgtgcaccgcgatgcccgtggcttcgatgtcccgcaggtcgcgctccgcatcgtacttgaggtcgttggagacgctgaacctgcggggtgggggcgtcaggcgcgcccacccttccccctcgccccccgcttccgccccccacccccgctcccgccccctgccccaggcagggcctcaccacaatgctttcttccggccgcgcaggtggttctccaggatgactccggccaccgtccggcctttgcccacgccggccccatcgccgatgagaaagcccgcgcgctgcccgctggggagcaggacctcgtgttgctgttgccggagagcaggcgtcagggcctgggggtgctggcccggcccctccccaggggcctcgcggacacaggctgggctgggttggggacatgcggtcacctggcaggcgtaggtgatggcctctagctgcagggcagacagggccccgctgtccgagggcagggccagggtgtaggtgatgtctgggggtgggacgctggacagtgtgctggtctccaccacgcggtctgggtgctgcttcccgatcttggctggaggagcaaggacggagggcaaggtaaagggtatggccaaggggtgaccagggccggttatggcacgctgggcgggtctggggcgtggccagagctggcggggcagtttgggggcgtggccaggtcccgttgggcgggtcatgggcgtggccaggaatgcctgggtggaggagtggtcagggctggccgggtcgggggtgtggccgcggcctgctgggttggttgggggcgtggccagcggcttgcaggaggggcaaatgcataaaaatcctcccagtgcctctgaggttcctttccacttctcccctctgcgaaccccggttttgtataagcctggattgtagaacctgtccccgggctctccggccctccctgaagcttcacattccctctgtgggctgtgcgggcggtggtcacctgcagggtctcggtcccacaaaagggtttgaacctgtcccagggctgggtgcagccgggccactcacacttggacggcacgtagtcggcgtaggtctctgtgtgccccagctcctccgcctcctcctcctcagcctcgtcctcctcctctggctggctctgcacactctgctcctgcgtgcgtggcgggagctcagcggagactgcaggcctgagcggccgcgggcactgggctcccccaggggcaggggccaggctgaccatgggcagctgagtgacccaggggtgggagacggctctgtctgcccctgcagcaaggtgctcccccagggcctccatctcctcagctataaaatgggcactcccagcttctaggccagccaagcgctccccacaatggagatgcctgtgctgagccctctccttaggtcccatgagagggcaggggagggagctctcggctgggcccagctcacctggtagctgacgagaagcggggtgctgtgggagggcagaaagtcctcgaagcctgcaaacggcctgctgagctggaacagctggaaggggagcaggatgtcagcccgggccagacgggacaggtcacagctggtgggccctcgcagcctggccaccagagggaggctccccactgccccgtcctcgcctccccatcctcgctccccagggccctgggtcttgctctcctgctgttctcagggtgaccctggtgcctcccaagcctccccagtgggcacctccctggggcctaaggctcgctcctcctggccagcacctggctgccttctcactgatggccagtgtgcctgcctggagtgcccgggaggaaggtgcccggctagttctgacagacaacacagcttggtcccgcgggagctgccaggaaggctgtggacaggggtctgacaggagagacccactgtgtgccagccccatgcagtgcaggaggccctcgggggcctgggagacaaggggttgggagctccctgtcgagggggaagaggagacagaggcagtgggggcgggcgggcctgggccttgtccctcacccgatggctcccagcacacagggtgggtggcccagggcagccctgcactctccaagaacccccgtgggtgcagtccctgaggcccctcgagggcagcacctcctctgtgagagatggggcaaggatgcctgccactgtagtgaccagagaacacatcccactgcggccccaccctggggagaaggactgcccggagcctcatgcagattcaccagggtgggcagtgacactgtcctcggggagctgaccccaggccttggcagacaggtgtgctgggcctctggatgagtctgtggcccacccaggggtctccgaactgactgggcgtgtaaagcctgtgaacgggtgggtcggggggtggtgtggcccgtcgtcatgcccactgtccagacgccaacactgagacagtgtggaccccgggacggatggctgggggatggtagggtccaaactagggtctgtgtgattctggaatatatccactcttaaaaagcaaaaatcctaacagtaatacgagccataaaaaacgtaagcatggtcagggtacagtggctcacacccgtaaatcccagcactttgggaggccaaggcctcccagagtggaggtcaggatttcgagaccagcctggccagcatgctgaaaccccgtctctactaaagatacaaaaaaaaaaaaattagccaggtgtggtggtgggcgcctgtaatctcagctgatcaggaggctgaggcaggagaatcgcttaaacccaggaggcagaggttgcagtgagctgagatcacgccattgtactccagcctgggtgacagggcgagactccatctcaaaaaaaaaaaaaaaaaaaaagtgagcgtgggccgggcatggtggctcacgcctgtaatcccagcacttcgggaggccaagataggtggatcacctgaggttgggagttcaagaccagcctgaccaaaatggataaaccccatctctactaaaaatacaaaattagccaggcacgatggtacatgcctgtaatctcagctactagggaggctgaggaggcaggagaatctcttgaacctgggaggtggagggtgcagtgagctgagatcgcaccactgcactccagcctgggcgacaagagcgagagactctgtcttaaaaaaagaaaaaaaaaagtgtgaagaattggaaaggggagaatcccgccgggtgcgtggctcaggcctgtgggaggcagaggcagaacgggcgagatcttttggggccagggttccagaccagcctggacaacatgataaaatcctatctctacaaaaaatacaaaaattagccaggcgtggtgtcgtgtgtctatggacccagctactcgagaggctgaggcaggaggatcgctttaacccagaaggtcgaggctgaaatgggctgaggttgcgccaccacactccagcctgggcgacagagtgagatcccgtctcaaaataaataagtaaataaataaataagagcatctcttctagacccggtcccccccttgaactccaacgtcctgagacgggtgaggtttccgcccaagcctgcctgagcccgggccgggttctcggcagtgtgtgggagccaccaggctagtgatgctaatgaactgagtccacagcttctgcattttctaacactaggaacactcctgagggtttttaaagaaagtggaagcgtggcacaggaaggttagaaacctatactcagttgccctctccttttttttttaagttaacaaaacacaaaaaaacagacgccacgcaggttcctggaaggctgagtcaccattcccggtggggctggcgggcattgggtttcagatgccctcgtgccggccacagcaggccggtcaggccctggcttctttcctcacgccctgctgaggacctgggagctagctgggagggcacgggccccgggctgggtgaaatgctctgctgggcccttgtgccagagggaccaagcctgagccgcccaccatggctgcggggtgccctgatgcttcctgagccgcccaccgtgagccacccaccgtggctgcggggtgccctgatgcttcctgcctgggcccccaagcccgtgagttctgctgcccgggttgccccttcctgagggcccgggagagcggcctatgggtgtgagcccaccactgtgccgggagcgtgcggaggctggcatgggccctcaccggaaggcgctcagtcccagagacatgtccaacgtctgctcccaaagtctagaagcttctctcgtggacaggcccggattggggaagggacttgccaggcctggctcccagccatgcctccctcaccagacacctccactgagtcgcactggggcacggctagaggctaggcccgaagaacctgggggccctgctgccctacaacccctgctctaggcctggcccacccaggtccttcaggagcttcttggaggcaaaccccagcccctcagcccccacggacaatgtccagctccccaccctgggacaggatccaccaacctcgccctctcagctccccactagcggggacacggccactgctgacccaggcaccatggggctggatgccaccacaggtgctgttcctctgcctggacagccacattgcctgggcccgctgggcgctgcctctccagggggcccttcctgaccacgcttctctgtcccgtcaccttcctgtgcttctctagaccagggactccccgggtgcggtggacacggggcagggtccctctcaggtggggccataatgggcactgcagggcgctgggcagcatcctggccccccccaactccatgccaggagcaccgcccagatgtggtagccacagatgtcctggacgtcgccttctcctattcaggacacaagaggaccctcaactaaccacctcatccatggccacagatggcgccgacagtgacaggcacagccattggcacgcagagtgggggagactgagacctcactggaccgtgtgggtcccgggctggggaggccacgctggtgggtcggggctggctgggggcaccgggcgcactgaccttatcgtgggtggagggggcagggttatcgtcccagatggtggacacctggttgaggctgtcagccggcaggaagtcgggcgtgtccacgatgtccgacagggagtccacggacgaggagaagatggagatgttggagaagtcctcaaaataggaggagtcctggaagacaaggccaggcccggtgagggtggtacgggagacaccaaggcccctccacgcactggagcacgtggggatgggagacaccacggccctccacacactggagcatgtgggaatgggagacaccacggccctcccaggttcaagcaattctcctgcctcatcctcccaagtagcagggattacaggtgtgcgccaccatgcccagctaatttttttgtatttttactagggacggggtttcaccatgttggccagcctggttttgaactcctgacctcaagtgatctgcctgcttcggcatccaaaagtgttgggattacaggcgtgagccaccatgtgacagagcgagagagtgagactccgtctcaaaaaagaaaaaaataaacaagcaatgggtgagaaacaccaaccctcagggccacgcaggacggcgtctgacttctgcagcacctgaagggcagcaatgctgcaggaactctgagcagctcgggtctggggtgagcctggtgccatgccctgtgccggaggcaggggcgggggcagccacgcccagaggtggggctcgccatggggatgacacacacacacgcgctgcccagtgaaggagatgtatgtacatcatttcatttttttttttttgagacggattcttacactgtcgcccgggctggagtgcaatggtgtgatctcgtctcactgcaccctctgcctcccaggtgcaagcgattctcctgcctc[224 bp omitted]caaggtggaagattgcttgagtccaggagttcaagattcgcctggacaatatggcaaaaccccatttctactaaaaatacaaaaattagctgggtgtggtggtgcatgcccgtagtcccagctactcggggggctgaggcgggaggatcacctgagcccagaggggtcaaggctgcagtgagctgttactgcacaactacattccagcctgggtgacagagcaagactctgtctcaaaaaaaaaaaaaatagactgggcatggtagctcacgcctgtaaccccagcactttgagaagccaaggtgggcagatcacctgaggtcaggagttcaagaccagcctgaccaatatggtaaaaccctgtctttactaaaaacacaaaaattagctgggcatggtggtgcgtgcctgtaatcctagctactcgagaggctggggcaggagaactgcttgaactcaggaggcagaggctgcagtgggctgagatcgtgccattgcactccagtctgggtgacacagggagactccatctcaagaaaaacaaacaaagaaaaaaaccaggcatgtcaagggggcgctgtctctccctggaagctgtgggttccgtccccctcaccttgctcagctttgcccactgcccaccctgtcagacccaagcacctgggcactgatcactagggaccttcaggaacctgcccccaaacagagacccccgggacagaggtgtccatgctgcccgcctgaggcccagagccaggtagggtgcagcaccccccaccccaggagggtaggagcagtccacctcccagagcctctggaggccccgatcggcagggttggggagcattcatcccactgaggcccacgagggccctccggacactgcccacccaggctgcagagggcctggtcacgctgacctgtggcccggaccctccgtggaagcatttcccgggcaaggtcaggggctcctgagttggtcaaggccccagccaggagcgggggtgagttgctatcgggcccagaaccgcccaggccttggtggtgcagggagcgcaggcagagcggaggagagctccccaaacccaaatgcgtgggtcacacggccagtccttccccggagctcagcgtggacagagggaagggacctcaggcagagacacctgccccacgccctcaccaggtgcccttggcccaagaagacaggacaacagggtcctcccgcccagggtcctccacccaaaactcctgccccagtctgaggaaacaccagcccgactactccagggcatccacaccacccgaccagccccaggaccgcccaacgcatctgaaacacgggcctctgagaaaccatcacagcccagaggggcctgaggagacgcctaaacaccacgtggggtcctgggcaggaaaggacatgggggaaactgaggcaatccaagcaaagcgtgggcctcaggagttaacggtggcgtacggatgttggttcatcagccgtgacagccacagacgggagatagaacagcagggagcccgggagtgggtgcacggggactctctgcactgtccctgcagcttttctgtcattctaaaacagtttgaaaagttaaagtcaagtcgggcaggggggagctcacgtctgctactcaggaggctgaggcaggaggatccgttgagcccaggtggtcgaggctgcagtgagctataattgcgccactgcacgccagcctgggagacagagcgagaccctatctcaaaaaaaaagttaaaagtcaagcagggcgtagtggctcatgcctgtaatcctactgttttagagccaaggtgaaagaatcacttgagcccaggagttcaagaccagcctgggcaacacagcaagactccatgtctacagaacgtttaaaaattagctgggcatggcagcatgtgcctgcagtcccagctactcaggaggctgaggtgggaggattgcttcaacccagttggtggaggttgcagggagccgagatcgtgccactgcacaccagcctgggtgacagagcaagtccctgtcacaaaaacaaataaataaaagtgaaagtctaataatgagggagtgcttgcagctttcaggcttcaagaacgcagcctcgaggccccgccctgctccccgtccggtccttcccagcacaggacaccccaccaggtgcatgagccctcgaagccttcacttctagcaggtgccctcagcgattagggacagagggagacggggttcccagggctggccctgttcacatgtgggaagctgaacagagccaggccagctccccccacagtggctccgtcctctgcccacatctggatttgactcctagcagccaccagctcacctcagagacagcctaagtcccacccgcgcctgtgtgtccctccacagcccctccaggccggcccaggctcctgcatccttcaccacatgacccacccaccctccagcctcagctcagcggacccagtgcctccccagggaaccgggcccctctgcagtctgtagtgagggcaagcaccaaggcccctcaagggtgacacttgcatccctccccgccagcccccagttctggggccccagggagggccggggctgcccgctgtggttcttgtctctgtagcatttcaggagccctgggctgaggtggggagctgggaggacctggctgggaggacctggctctgcccgcttcaaaagcagcagacacagctcctcctgccctgggcagccaactccagacctgactccagaactgactccagacctgatgtgctgccgctgccctgtgctccaggacccatggggagccacagagccacagggatttgccggcctgcgccaccagagccagccctgaccaggcccacccagcctccgctccctacaagagccccataagacacccagagcccctccacctgaggcttctccagaggaaagccacagctctgggtcctaccccaggggcagaaggagggggacgcagccctcccgacagccactgccactgtcactgagggcccccgtccgggcagggctgagcccgacccccccactccgctcgggtcccccagcctacgcacagggcgccgctcccagcccgaagtcttaaatctctgcctcggaaccttccggcagattccctctcactgccagaagagacggacggggcggggtggggatttttttagatcctggcggcctcggactctaggatgagatgccggctgctccggcagggggcccggccgtcctgaatggggtcccacctcccagacccctgcccccgagggcctcgcccgccccgggaagggagtgttaccttgttcagagcctcaaactgcagccacagctgcagctgggacatggtcccggcgctcggggggccaggggtcccccaggaagcgctgcccgggagcggctccctcatgaccgcggcagcagccccagcattgggtcggccggggcggacgggggcggctctccgcccggctgcatttgcatgtcggtttagtcaccgccgccggcgcctacttcctctaaggccggggctgactttcaggaaatgatgccggccccgtaagtcagggcaattaccggcagtgcgaggagaattactgtacggggcggatctcccacaggcgctgtcaacacgcaaccccacccgtgccccgccgcaggaccagccccctttggggcacccggcggacgtgcagaatgcccaggtgggcatgggcctcggtctccccagactgcagggagctgggttccgttccacggggaccagctgctgttcctggtgcccccaaaccacaggcagggaaactgcggccaagaccgcctcccttcacccagcaccccacgcatgccaagcgcacctcaggccctgctgcgcccccctggggctctccccaccccacccctgcaggctgaggtccccgagaagcccctgccgccgaagcaaagtcccctccctgctctttccctgctgtccgtgcccagggggttcagcgggccccgtggcctcccttgatctggggctggcggagggagagctgagcctgggcccctcctctccaggctctggccagacccggcctcggccccctgggcaggaacaagtggtagcgtcctgggaaaagaacgttctcgctttggtagaaaaccaagtgtcaatgatgcacttgctggggcaaccccgggccgcgagcccgcccgcggccacactcttgcccgcactgtgaggaccctggcgcatcacaggggcctagacaccgcggggcagacacctgatgggacctcacattgggccacaggcggtcattctcggtgtccttggaggagctggggaggccccagggccagagggggtgggaggacggccgggctgtggagaggacgggccccatctgcctgtactcagcgactgacggggcagaggccgcattgcccacgagaccgcggccgagaccgcgcaggtggccacggctcctcctctgtgaggggaggaagggcccggccctgtggccaggggccctgggaaagaaggaaaccgccccgagaggccaggggagcccgtggctgggccggagggctcgggacagttctgggcttgtaagactcccgccagggctctgaggggagagtgggaccagggggccctcaaaccctgtgcactccgccccctcgggctcaccctgttctagaccctgaggccctgtgccagccccactggggccccgcgaccaggcaccgcagcagcggaggctggtgcagactgtcgcccacaccccttgccacgacccatcacctcctggaggctgggcgacaacacgggtccgtgccgctggggcgaggggcccgcctgccaggcaccccgcccgccaatggaaaacaaccaatggggaagaaacccacggagccgctcaatccggcagccaatcacagccaccgctcaacctagcagccaatcacagccaccgctcaacccagtagccaatcacagccaccgctcaacccagcagccaatcacagccactcccagagacagctccacaccagctccacgcaaaaaacccacaaccacaagcgctgctgaggacgcggggcagtggcctgggaaccatcctgcagctcctcaaaagaggcgaatggggagtaacaacccagcagctgcactcccacgtgccatcaggaggacccacagctcacaaaagcctgaacctacagctcaggagtggacccacagcccacaggacccacagctcaagggtggactcacagctcacaggacccatagctcatgggtggacccacagctcataggcgcctggacccacagctcatgggtggacccacagcccataggacccacagctcacgggtggactcacagctcacgggtggactcacagctcacgggtggactcacagctcacaggtggacccacagctcacaggacctacagctcacgggtggactcacagctcataggcacctggacccacagctcacgggtggactcacagctcacaggacctacagctcacgggtggacccacagctcccgggtggaccctcagctcccaggtggacccacagctcatgacagcctggctcctgcagcgcagtcaccacggaggaacagggccagcacagtgaggccgtccacacactggaacacgacccagccatgaaaaggagcaaggctctgacccaagccacagcacggatgcaccttgaggacctcacactcagtgaaagacgccaaacacagaaggccacgcagtgtgtgaggccatttctatgaaatgtcctgtcctgaacaggaatccacacagacaggaaaagcattcaggttatcagggggtggggatgggctggggagtgacagctgatgggaacggggcttcctgtgggatgatggaatgttctggaactagacagaggtggtggttgcacaact[213 bp omitted]gaggcaggagaattgcttgaacccgggaggcagaggt[136 bp omitted]ggaagctgaggtgggcaaacagcttgagcccaggaagttcaagaccagcctgggcaacatagtgagatcccatctccacaaaaaatacaaaaaccagctgcgcatggtggcgggcacctgtggtcccagctgctcaggaggccatggcaggagaatcacttgagctagagaggtggaagctgcagtaagttatgatcacaccactgcactccagcctgggcaacagagcaaaatactgtctcaaataaataaagtggattttgtggtatgtgaattttgtctcagtttttaaaagacctggaaagcaacgaaacagaaagaacaagcacagactccgacttgctccccaggccccaatgtgacagcacagcccagggtccctggagcaggtcagactgaggataggggtgcgccgcctagggacctgctgggcactaccccacccacctccggcgccccgcgcccagtcctgggctcccgtggcccggtctctccctccgcctctgtccagggtgcacccctcactgaccagtcccgcagcaacgctgaccgagggctccgtgtaagcctggctgaatgcccgctgcctcagccctcacaggaaccctgccctgcattacagggagggaaacaggctacggggatgggaggggctcctcctggagggggctggggggcagacagaagaggcttccaggtggtcgtggggcacaggtggcacttcctagacactgccagtctttggtggctgggagaagggcccctcagcaggcctggtcactagagtgccccgtgcagagctgaactgtgtccccaaaatggtgtgatcatgtcctggcacctggaagctgtgtgtgtggccttatttgggaatccggtccttgcagatgtgagtggttaaaaaaaaaaaggccgcactggccgagcgggtgttctgtgcctggtgtcctcattcgaaggagacacagtcccggggaggaggccacgggacacagaagcagagatcccagccctgcggccacagccaggggatgcccggatcccccagatgctggaggggccggaaggagcgcggccctgtccgcaccttgactttggacttccaggctccagggctgggaggggacagagtcctggcctttgaagctgtgtgtgctgcttcctcacagcagccctgggaggctggcacggctccccaggaaactgggctcccttctgtcagggttccggccaggtgcctggtatgggccctggggccgccgcctcagtgtcttctggtgctgcagccgggcagggccgaaccctggcgcacagcttcctgctgagtctccctctctaaggctgtctgtgggcggctctgccggcccctcctgcacctgcccaggccctgggcggaggctcctcctcccgggggggctgtggcctcagcacagaccaggggacagaaggtggctcttcttggccttggctgggtgtgaaccaaagacttcctgtaagaaatccccctctccctctccctccttcgctccctcatctctctccctcttttttgcccaatgccagtaactgtgggggctccgtggtgccggatgggccgaggcatctgacccctgctgaaacgcatctgcagaacagtcaatgctgcctgcctccctgcctgaaagcagccagagtttgcaaagcgcttttctgagccgtgagctcatcctgagcttcccagaagcccccgggctgccaggcagagagtgttgttaccggacagctgcgttcccaatggtccctgcagccccatggggacccgggatggatgcccggcaggtggagaggtcctcacaggacaggtggtgggcaagggggcagcacctggggaatggggatgggctgtgggtgccgagagccccaggagcccagcagagacgcaagggatctgggtgatgtcaggaagggtgaaggagcacccccaccccaggaacaggcggcaagggatgggcgaggggcagtgaggcgagcaggacctggggaatgtcctgtgtaggggcacaggctggggagaggcttgggctggggtgcggttgggggaggctggcactggggtgcagtggaggagaggctcgggctggggtacagtggggggaggctcaggctggggtgaggctcgggccggggtgcggtggggggaggctcgggccggggtgcggtggggggaggctcgggccggggtgcggtggggggaggctcgggccggggtgcagtggggggaggctcgggccggggtgcggtgaggggaggctcgggccggggtgcggttgggggaggctggcactggggtgcagtggaggagaggctcgggctggggtgcagtggggggaggctcgggctgggggggtgaggctcgggctggggtgcggtggggggaggttcgggctggggtgcggtggggggaggctcgggctggggtgcggtggggggaggctcgggctggggtgcggtggggggaggctcgggctggggtgcagtggggggaggctcgggctggggtgcagtggggggaggctcgggctggggtgcagtggggggaggctcaggctggggggaggctcgggctggggtgcggtggggggaggctcgggctggggtgcggtggggggaggctcgggctggggtgcggtggggggaggctcgggctggggtgcagtggggggaggctcaggctggggggaggctcgggctggggtgcggtggggggaggttcgggctggggtgcggtggggggaggctcgggctggggtgcggtggggggaggctcgggctggggtgcggtggggggaggctcgggctggggtgcagtggggggaggctcgggctggggtgcagtggggggaggctcaggctggggggaggctcgggctggggtgcggtggggggaggctcgggctggggtgcggtggggggaggctcgggctggggtgcggtggggggaggctcgggctggggtgcggtggggggaggctcgggctggggtgcagtggggggaggctcaggctggggggaggctcgggctggggtgcggtggggggaggctcgggctggggtgtggtggggaggagaccagaagaggcaccaggggctgccctgggggacactcaccccacacagaaacaggtgccggagagcctgggggtggggccgcgaggctgggctgggcctggagcaggggacccacgggaggctctgggcacagagggtgggctgcagcagcaagggccccttatcctcgagcaggaacccaacaccccccagccagacccagtcatgcctggaacacacagacatggacctgcatatggacgctgctaacagcgattcacagctgctgtcaacccatacctactcctgggtatgagcccaagagaaacgaaaacgtgtccactgggaagtttgcacccgtgctcacggcggcacaactcacgacggccacgggtggaagcagcacaagcgtccatcacggacacacagacagacacagtggggccctccacgcctccatcacagacagacacagtggggccctccacgcctccatcacagacggacacagtggggccctccacgcctccatcacagacagacacagttggtcctccacgcctccatcacggacagacacagtggggccctccacgcctccatcacggacagacacagttggtcctccacgcctccatcacggacagacacagtggggccctccatgcgtccatcacggacagacacagtgggtcctccacgcgtccatcacagacagacacagtggggccctccacaggtccatcacggacacatggacagacacagtgggcccctccacgcgtccatcacagacagacactgtggtacctggtacctccacgcgtctatcatgaacaaaaacagtgggtcctccacgcgtccatcatgaacaaaaacagtgggtcctgcatgcgtccatcatggacaaacaaggtggggccccttcatgtgccggaacacggctcagccataatcaggagccaggctctgacccagccatagctcggatgtaccttgaggacatcacactcagtgagagacgccagaggcaggaggccatgcagcgtgtgatcccatttctatgaaatgtgcaggacaggccaagccacagagacgggaaggggatgcgtgggcgccggggcaggggagggatggggagtgacagctgacggggacagggcctcctctagggggacaatgatctggaattagaattacatggtgatggctgaacagctctggactttgtaacagccacagcatcgttcacttagaaatggggacttttctgtcacgtgaattgagtctcacgtgacagaaaaggggcggggcgtggtggctcgcacctgtaatcccgacactttgggaggcc[135 bp omitted]gaggcaggagaatcacttgaaccaggcaagcagaggctgcagtgagctgagatcgtgccattgcactccagcctgggagacagagtgagactttgtctcaaaaataaataaatatggtgcgcgtctgtaatcccagctactcaggaggctgagacaggagaatcgcttgaacctgggaggcagagtttgccatgagccgagatagatcacaccattgcactccagcttagacaccaaaagcaaaactccatctcaaaacaaaacaaaaaactagagaaaaacagagacagaaaagaaagaaagaaaataaagaagaaatgcaggccgggcgcggtggctcacgcctgtaatcccaatgctttgggaggctgaggtgggtggatcacaaggtcaggagattgagaccagcctggctaacacggtgaaaccccgtgtccactaaaaaacacaaaaaattagctgggcgtggtggtgggcacctgtagtcccagctactcgggaggctgaggc[135 bp omitted]cacagaaccacggttcacctgcacaccgcggcagggggccccaccaggacacacggggctgagccatcacccaccagggacattgagcctgatggcttcgcgccaacctggagacggaaggctgagcagaagtgaggggggcccttcctccgggccagggtggctggagggccgggcaaggcacacacgtgacaccgcgggagccccgcagcccacggtggatgccagcagcggcatcctggcgcagcgtgagccccaggggtgggggtgggggtggccagggagcaggcagagagcggggaaggggtgggggtcccacacagacccagccgtcagcaggagaaggcacacggaaaacagacggacgcagcagggatgcccgcaggcagctcccacgggcagaggctgctgaccccgccttgggcaggaccagcctctgctcagccttgggtcttcccccaggctgagagaaacaggaaatggatggtgaaggaaccccgtccccgccaagcggccaaagttaccagcatcagcacaacacgcgcaacgccaggcactccggtccacgccgcactgtacatggtgccgtctgagggattcctccatccagtcaggagacaaccccagacaaaaccaacggagaggcactctggagaagacacaccctggagaagacacaccctggagaagacgcaccccggagaagacgcaccccggagaagaggcgccccggagaagaggcactccggagaagacgcgccccggagaacacgcgccccggagaagaggcaccctggagaactgcctcttcgggggcaagcgcagaggctgctgactcccccggtccaacaagctcttagtttttgcaatttttttgtaatttttttttttttagacagagtcttgctctgtcacccaggctcgaatgcagtggcgcaatctcggctccctgcaacctctgcttcccgagttcaagtgattctcctgcctcagcctcctgagtagctgggattacaggtgcccgccaccatgctcagctaatttttgtatttgtagtagagacggggtttcgccacgttggccaggatggtctcaaactcctaagctcaggtgatctgcccgccttggccccccaaagtgctggggttacaagcttgagcactgcgcctgacctgtaaatctaatttttaattttgtatagagatgaggtctcattatgttgcccaggctggatccacgtgtccttcatggacaaacacagtgggcccctccacgcgtccatcacggacaaacacagtggggccctccacgcatccatcacggacacacggacaaacacaatgggcctcccactgggaactcccagactcaagcgatcctcatgcctcagtcaaatagatgggacccaaatactgggactacaggcttgcaccaccatgcccgactaattttttctattttttatacagatagggtctcactatgttgcgcaggctggtctcaaacccctgggctcaaacaatcctcccgccttggcctcccaaagtgctgggatcacaggcgtgagccaccgtgcccagtcctgactcaaacatgacctcctgcattcccaggggcagaatctcccaggcacagtggccctactcggagtctgtgaagtgaagaccaccaggtgagccatgatcaaccctcccctcaatgacctccctcacgatcaaccctcccctcaatggcctccctcctcatgatcaaccctcactcagtgacctccctcatgatcaaccctccctcaatgacctccctccccacgatcaatcctcactcaatgacctccctccccatgatcaaccctcactcaatgacctccctcatgatcaaccctccctcaatgacctccctcacgatcaaccctcccctcaatgacctccctccccacaatcaatctgcccctcagtggcctccctccccaggccgtgaaggctctccagcagaaccaacagtgctgcggagtccactggccccaggcactgcccgggtccacggctcatctgctttctcctattgctctggctgccaagaaactcagggctcaggtgtatcaatagt[134 bp omitted]gaggcagaagaatggctcacacttgggaggcagaggttgcagtgagccgagattgcaccactgcactccagcctgggtgacagagcgagactccgtctcaaaaaacaataggccaggtgcggtggctcatgcctgtaatcccagcactttgggagacgggcagatcacctgaggtcaggagttcgagaccatcctggccaacatggcgaaatcccatctctactaaaaatataaaaattagccgggcgtggtggtgggtgcctgtagtcccagctacttggtaggctgaggcaggagaatcgcttgaacccgccaggcagaggttgcagttacccaagatggcgccactacactccagcctgggcaagagtaagagtcggtctccagaaaaaaaagtcatgactagctgtctcgttatggcctgtggggttttacattcaccctcactcccagcccaggaacaggttctccctaccaatccctccaggtttatacaacagcaggaaacatttgcagggaatgcacacatgccacaggtcacacgatggctttgaacggtgcctccgtttcccctcgctcccgtgaaaagctactgtcaacctcatggctccaacaagctgaatatggtggctcacgcctgtaatccccatgctttggtaggctcaggcaggagaatcgcttgagcccagaagtttgagaccagcctaggcaacacagtgagacctcatttctacaaaacataaaaaattatctgggtgtggtggtgtgtccttatggtcccagctactggggaagctgaggtgggagcttgagcccaggaggtggaggctgcagtgagccgagattgcaccgctgcactccaggctgaacaacagagccagaccctgtctctaaaaataaaaattaaaaaaatatataaatgaaacacacacttatcctctcacagtctggagggcagaacttgtaacatcaagggtgggcagggcaggtccctcccgggggctccaggggaaaacccagttcctgcctttccagtgtccagaggcacccgcatcccttggcttggggccccttcttcccccttcacggccagagcgcaggctcttcccgtctctctctggctctcaccctcccgcctcctctcatgagggccctgtgaggacactgggtctccaggtcacccaggaagctctcccgtctcgggtccatcactcagtcccatctgcaggtccctgtgaggacactgggcctccaggtcacccaggaagctcttccgtcttgggtccatcactcagtcccatctgcaggtcccgtctgccatgagaggcgacacggcggcaggtcctggggatcaggacggggacgtcttggaggctgtaaccgtgtggccagcacatttcctcaggtctgagtcgggagcagaggcttccgtggctggctgggctgcgctggggggcacggcgcaaagggcctcgaacaccaggctcaggtctgggctccttcctggctccgcagaaccacgcggcccagcccacaggcctgggctgactcatacccgtcccgtcccacacttggcaccgcgggaccacgcatcccgtcccacactcgacaccacagaaccttgcggcccagcccacaggactgagctgacccacacccgtcccatcccacactcagcactgggggaccacgcggcccggcccacacttggcaccggggtcagacttcctccaaatgaagttctgctgctttaacagggagatttgggtccaagctgccccacatacggacgctggagcatgaggcggctgtaggcagggtgggcagggagccgggcgggcggtgctcacagaaccagcacagtggccccgagggctccgggctgaacagatgcagcagcaattgttcaggaggggaggagcaggagaattcatgagacagagatggagacggagacagagacagagacatggagagagacagagacagggagacagagacgcagagacatagagacatagagacagaggcagagagggaaacagacgaagacagagagggcgacagagacagaggcagagagggaaacagacgaagacagagagggcgacagagacagagagggaaacagacacagaggcagagagggagacaaagagacaggtggagagggagacagagagacagaggcagagacaaagagacagagacagagagggagacagagagacagagacagagagggagacagagagacaggggcagagacaagcagagagggagacacagacagagacagagagggagacagagagacagaggcggagatggagacagagacagagagacagagacagagagggagacagagacaaagagggagacagagacagagactgagagggagacagagagatggagcatagagggagacagagacagaggcagagagagagacagaggcagagaggaagacagaggcagagagggaggcagagacagagagggagataggcagagagagattgagagggagggagacagagagagagactaggagcag[138 bp omitted]catggagaaaccctgtctctaccaaaaaaaaaaaaaaaaaaattagccaggcatggtggtgcatgcctgtggtctcagctgctcgggaggctgaggcaggaaaatcgcttgaacctgggaagcggaggttgcagtgagccaagatcgtgccattgcactccagcctgagcaacaagagcaaaactctgtctcaaaaaaaaaaaaaaagaaagaaagaaaggaaagagagaaggaacacacagaaagaggcagagaaggggtgaaagagaagaagggggcggggcaaggacaggctgacccagggctggggctggtaggaaggcagtggcggtgaggaaggagccactgccatcagtcgcaccccgggctcctcccctgtgcgtcccctgaagggtggggcacagatgccagctctggacaggcgcctcccctgcctcagtttccttctgtgtccggctggcatggcgcagcagcttgccacaccttggccaggaccagatcacatgggggtccagggctactgcgggtgaggacagagcccctgtgcgcacctcgctgacctcagccccaagatgagcaggggcgcccccctcccctgaacacagctggtaggccaatttccaggccacacactgggggctacaggacaggaatccaccctcttcccgtcccagggcccgggagtctgaggccaaggtgtctcagggccttgctccctcccacagctctgacccacctcttccagccctggggctccaggagaaactgacctgtggccacaccgccccagccccggcctccagcgtggcgccagctcccaatctctcctgtctcttctgaggacccttgtgctggatttcagagctacctcatctcatcttgatccctacccaatgacatccaaaaagaccctactttccaggaaggtcccctcacagactctactggggaggcggacttgacggacgcggtcaccccagcacagactcagggtccggctggctttgccccgctctgctacggccctgagtggggaaaactgggcccggggtccacccggcgagctgtttgcagggcctgggtctgggtgagccctgggacctgaattggctccattctgctgcagccacacctgaccgcttctctctggatctggccggcttgcgcccatccccccaacagctctgaggcccaggcagatctcacatgcccattacacaggggaagcggaggcttgggggagctgagcaccaggtgaccctcgctccccggcaggccctggatgtggtccggcccagcagcagcccctggccccgggtcccacacggaggctgtggtatccgaaccgtcccagggaagccgatctctgtggcactgggtgctccagagctgccgagaggaagctggggcactgggaaccccttggggaaggctgtgagggtgggggtggggtccgcctgatgccgcagtgggaggctgtgagggtgggggtggggtccgcctgatgccgaagggggaggctgggagggtgggggtggggtccgcctgatgccgcagtgggaggctgggagcctccccgcgaccctggggagaaggaggtggaaagttctgttcctttggtatgtgagttccgttttcaggtggctgctaaggggttgggactccaatgtgcagggtgtctggacccgcctagagggagggccgtgggggcaaaggctgccaagggcatctctcccagcaccgccctccccgcaactccctctgtggcattgcccagatgctcgcagggaccccaagggctgggcggggctcactgctgacacgaagggccagtcactggctcttccccaaaaccaagccacatctctgggctcctactgccccaccgtaaaccctgcggccgaggggccaagccgaggtcactgagtcccaggcaggcctgagcgagagaggtcgcagggcagctggaggggcggcccagactccaccctgccccccacggcgcggtgagctcctggggctcctacctgagcaaagtcgcaggtctttggtggcaagctggaggcggtggccacgggggcatagctggtgtctgggcagggctggctgccgaggaaggaggcggagctcatgaacgggctggagggagatgggggggggggaggtgagatggggtgctcaacccactccctcagtaacacacctgcacccccatggccgcagccagaggcccctcgaggccccactggagtgtgcccagcccggcaggacccatggccccgctgcacatacagaggggcctccaggggggtggtggtcaagcctggggctgccctcccacccccactggacacagcccggcagagctcctacggaacagccgcctggtgggcggggggacatccagggccaccatcccgccctccccgctccatcagcaggactcggctaagggttcattctggcgattcagaaccccagcctggccatccctcccccacacacaggccccttgacccacacctcactcccgcctcgaaggaggagagcgctacgggcagaaacccaggatcaccgtcctccagggagggctcaggtcggaaccccccgccctgtcaccctgaggatggcaaaggacacagcaaggagaaggtcctgggggccccccgcccaggggcgcctctctccagatgatcccaggagtaaaatgtggctggcagggaggcttctctgcccttccccactccggcccccttggccagctcctgcgcttgggagaggggtggccgccgtccccagggcctccttccctcccgccaggctccccaggctctccctccagaagcttctctccagcagggctggcagcaggtccaggtctctgcccagtgggagccggaggccttgggttggaggcggccctgggcagacctgctcccagggcagggaccgcctgggggccactctcctcctgcatagaaaggtttgcaaacaccagcaggaaagaagcatccactccactcccgggccacaaacagctgctccacaatctcctggagtctcccaaggctctggctatacctgctcccaagccctttgcacagcctgctcgactgctcgcctggccaactcctaccccccctgcagaacccagcccagctgctgccctctgtgggaaaagtgcccttcccaccctccttcacccaccccagaaaacctcccgccccttcccaccctccttcaccccagaaaacctcccgccccttcccaccctccttcaccccagaaaacctcccgccccttcccaccctccttcaccccagaaaacctcccgccccttcccaccctccttcaccccagaaaacctcccgccccttcccaccctccttcaccccagaaaacctcccgccccttcccatcctccttcaccccagaaaacctcccgccccttcccaccctccttcaccccagaaaacctcccgccccttcccaccctccttcaccccagaaaacctcccgccccttcccaccctccttcaccccagaaaacctcccgccccttcccaccctccttcaccccagaaaacctcccgccccttcccaccctccttcaccccagaaaacctcccgccccttcccaccctccttcaccccagaaaacctcccgccccttcccaccctccttcaccccagaaaacctcccgccccttcccaccctccttcaccccagaaaacctcccgccccttcccaccctccttcaccccagaaaacctcccgccccttcccatcctggtgtcacctccacaggaggcccccctggcccatagcccacacctccccgccctctaccaagctgggctctcgaggagagggaagccatggatcacaaaacagcgttccacaaacaggggtctcagcctggacctggcccgtggggtggagccttccaggaccacgtgcacaccaccctccaaacccctcaacaagactttgggccctcgcgccctgcacccagaactccgtttgtaactgtgacttcagaatgagcaagcctgggggccaggcggggagggtcccggtactcaccggctgtcgctggagaaggcagggtatggcggcagcgagaaggtgttccagtaggggcagtgcagcatggcgctctagaagagacagcgggcatcagtgagtgggaagcagaggacctgcggtgcagcccggctaagccctccgggcagggtgacaggccgagaggctagggaggccccgcagtcagggtcccatcccgcccctgctggtatctcctggggagtcatttaactgccccgtgcctcagtttccccacctgcacaagaccccacccaaggcttgtggtgtggtctgaaggcactgaaccacccgcgtgaagggctcagcacaggtcttgctctaccagcagccccatgtgcaggcccgcagcccgggagtctgcatctcacacaagacctgggggtgccgctggccccgggaccctgcttggaggccccattctaggaggtggaggatcggaccgtttgcgtgagggagacgcgcacccgctgcctgtggtggagggtgggtgtcgggggctcctcgggcagggcctggggcaggcgagggcctcacaccacctccaggcccctcggacaagctgatgtgcccgggaagctcaggctgctgcgggacggggccctgacttctcagaagctgcacggggctggggtgcggggagcctgctttgggaaatggtgaccagtggcctggaggctcagcccgaggtcagtggaggcgtgagtggctccaggttggccgaatctctggtgggtctgactccaggccaggcttacccaacaccctcgccaggagccgatgtccccaccccatggttctctgggaaaacctcactatgcctgcccttgggaatgagagcggcttgaggcacacggcaggccccaaaacctgaggatggggagcacacggggcagcagcgggcccaagggcggcagcgggcccagggtcagcacctgcggcttcgggggcagggctgtggacacctcgtgccctgcagaatgggcacccctcagcagggcccccacctgcacagggccaacctcacctgcagcagagagaccctgccgtcacagacgcccccacagtcacgggggagaccctgccgtcacggatgcccccacggtcacgggggagaccctgccgtcacggacgcccccacggtcacgggggagaccctgccgtcacggacgcccccgtggtcatgggggagacaccaccagccgggggcatcatcctgcttatcccagcaggactgggggccacgctggcttccagaacagggttgggggttcgcctgcttccctgagtcccccagtgacctctcccaggcccacgtgagccctgctcctctatgaggccctgatgcaattccctggggctcggccacctctgcccctcattcacctcacactggctgggaaccagcccggatggccgggggccactttctgtacccgcaggtgctgggtgggggattccaggacccccgacagcctcgagataggcaaagccctcggggtgaccgctgccccgctcctccagcttttgcataaaataagtttatcagcaaaagcccacagctcctcccctgcacagaggccggcagcctgggcaccctgagctcctgcacccgtgagaagaccccgtgcaagtggcttgcaggaagccgggccaccagccacaggggctccagagcccgggtctcctgatccttcccctcctcctgcccttttgggaagagagaaagccagccctggagagaaacaggaacttcccaaggccatgtggcacatccggaacattctggaacagaactctgactccagaccaacccagcctcctcagatgagctggagtccgtctcaggcacacacggcgccttgggccaggctgggcagggccacggccagggaactgcagctgcaggaagggggcggggggcttggggtcgcagggcgggaggatccaggggtccctggctcacccaacatgctccacctgtacccaggccaggctaggggatgggacggggggaaagtcctgactgcctctatccccctagtctcctccctcccacagcccatggctcctctgagacctgccatccacacacacccgagtcccaccccacaggggtgccatgggcatggcaggccaatcagagtcttccctgggaccttctctggcagccagagggtgtggcttcacctttagatggcaggtcctagcacataattggtccagagatgggcacctgaccctgcccagacaatcagagcctgcctggtgattttctttcctttccttattttgagacggagtctcactctgtcacccaggctgaagtgcagtggcacgatcgtggctcactgcaacctccacctcccgagttcaagcgattctcctgtctcagcctcatgcgtagctgggattacaggcgcccgccaccacgcccagctaacttttgtatttttagtagagatgggatttcatcatgttggccaggccggtctcgaactcctgaccccaagcaatgtgcccacctcggcctcccagagtgctgggatttcaggcgtgaaccattgtgctggccggtgtatttttatttctaattgaatactctgggcactggaagaggctgggctgtgcgtgtgcgaactcagtcgaccctgcccagaggtgtccatgacgtacccgaatgtgacggaacccggaacagggagggtgggatgagcctcacacacgggatggggagcaaagccggttacgcgcacgggtgcgccccggcctgagccctgtggctggtgtccagtgcccccgccgggttccagccctgtcgcattccccgactgtcactgctaacaccttcctgctcccgctcggatccttgaagatggctcctctgtctccacatcccataattcgcttaattatttccccaccgtagagcctctggggagattccagtttcctgccactataaatagtgccgctctgtcttcccctccctcctggattagtccccagggtgtgtttccgagatagaattcttggatcggaacaagctcctggcgggtttcgggggatggagctgttccggtggggatgtggcttggccagtcccctttatggtggcccaggaggctgaccgacggccggtactcgagctccaccggggcagctgtgaggatccagcctcaaccccaagggactcaggaactagggagggggacaggaggggtctgggccgcaacagggaccctgctacgagaggggtaccctggccccagctcagagccccctctggacggtcagaacatggcaggaagctgcccaaagccctctgaggatggactgccgaggggtgtctgtgatgttcgccccacaggccaacctgggtgttgggctagggagtacccaggagaccctggagtcctggagcaggtcctgctgcttgata[138 bp omitted]acggggcaaaacctcatctctacgagaaaattttaaaaatctgccgggcatggtggcgcgtacctgtggtcccagctactcaggaggctgaggcaggagaatcactagcccaggaggcagaggctgcagtgagccgagatcgcaccactgcacttccagcctgggcaacagagtgaaaccgtgttttaaaaataacaaaacaaaataaaataaaatgaaataaaataaaaataaatatatatatacacgtttatatatttttaatttaaaaatttttttttttctttttgagccacagtttcgctctgtcacccaggctggagtgcagtggtgcaatctctgctcactgcagcctctgcctcccaggttcaagcgattctcctgcctcagcctcccaagtagctgggattacagacacctgccaccacgccaggctaattttttgtatttttagtagagacagggtttcaccatgttggccaggctggtctcaaactcctgacctcaagtgatctgcccgccttggcctctgaaagtgctaggattacaggcgtgagccaccgtgccaggcctatttttcatttttttgagatggagtctcactcttgtcgcccaggctagagttcagtggcgccgtctccactcactgcagcctctgcctcctagatttaagcaattctcctgcctcagcctcccgagtagctgggattacaggcgtccgccaccacgcctggctaagtttggtatctttagcagaagcgaggtttcactatgttggccaggctggtcttgaactcgggacctcaggtgatctgcccacctccacctcccaaagtgctgggattacaagcacgagccacttggccagaaacatattttttaagtaattccctcactgacaggttcctacaagtaaagttgagccccccctacagctgacggcgaaggaactggaagctctgcagcagggagaatctcctcaaatgtgcttcttgaaaagctggggccatgagtagcctcccattcacatccccatggggacccttctccagggcccacgggggcgggtggagccgggctccgggccaggaaggtcaggtggagatcacgccgcgtccactggggcagcattccgcacgacgtgaccccgggcactcggagcggggcaagtgcccgtggaccccgtcgggtgggccggggccgggggtggggctcacctgcaggggcggcgggctgtacaggaggctgcccgccggcgggggttcatgctgcgggtaatccctgtccatggcgggccccactgcaagcatcgggcggcaggcggggtggggtcctcggccgggcagcaggcggcgggactccaggacccggggccgccggggcgtctatctgggcttctcgctccgtggtggcggcggtggcggcagcatcatgatctgcagagggagacggggacgtcctgagagtccaacggtggtggagagtggtgctccccggccgcctctccctcgggcatgaccggtcccagcctgggctgcagctcctgctacctcctgggccggaaccaaaaggcgctccttcccctccccactcacccccacccgccatcagcagtgccacccaactcctttgtgctgcccacagcgcctttcctggcctccccggccccaactacaacgattaaggtgggcccgacagggctgcccaggtcacagggcagccgtaggaccaggcacccagactgtgagcagtggagctgcaggctgactcccccacatctggctttgtcagcagccggtgtgagactgtggagggagagtccaacccgggcccggcacccaggggagcccaggggacactggacccagccctgtccctcagaggcagcaggggctccacagtgaggtctcccaaggaggggggtcaggggccacgcagagctggaagagcacccagacctcgtttcaggctaatcacacaccagcatccccactgagaacgttcctgggctacagagccgagccccacaccatcagacgccagggacagctcccacgtgccccgcggcctctggcacacggccagacgcccgccaggctgagcccccaccaggccctacctggcgagtgcagggacccaggctggcccgtggtggcagggaaagctttccaggcgtccgcccagcatgctcactgccgagggcggcaggaaggggaggcggcggccactcccggccaagccctggagtgaagaaatctccgggacttccagtaattgccgtccagccacacgcaggcacttgtgcaatcccgtgggggagaggcacgtctctgcccggcgctccagagacagtggccgggcaacaggggctgggggtcgggactcctgtcccagagaccagatggaggtggtcaggcacagtgggggtcaccctgccaggccgtcccaactgtccgcggcctctgcctgctccctgcagtcaggacgctacaacccactgccaccagagctgggacccttggcagcccttccagctgcccacggggacctgcgacacccttgccagaacggccctttaggggaagggacaggcccgctgggatctggggtcttggccaatccttgtcaaagattctgggtcaggcaggatcaaagcctggctccaccttctgagttgaataacctcagacacccaagctcctccaagcctcggtatgttcctctgggagacaggttctctgggtagagcctgggaccccccgaccccggccccgtgtgctggtggccacaaacagctctgctgggcccaaggcagctgctgataccggggtccccatccaggggcccaccagtgctagggggtggcccaccccctgccttggggctcagcagcccctcccctgcagggactcccctcagctcctgtcagcaccccttcctgctgcaggttccatctcacggcagccacagccccagagctacgctgaccttttccacactcagggcgctcctcagctctgaggccacacagtcctgagctgatgggcagcagggcccaggccccacggtggacggagcttggggagggggcaccttgggcagctctggggcgaccccatgaccgtcctcggggtacaccatagctgagggacccctccagcagcaggggccctgagctcgcctgtgtccgagtcccctaggccagcacggtgctcctggcagctcctccctccctacggtctctgagccccccacgtctgtggacgccccttccaggcggcaaccccaggaggctcaggggaccgggttcttcaaggggagggcttcacacatggcatgtgacctggagtccatgccttggggacctggcagggtgtggagacctggaccgggaggggatgggggcaggagaacaatgcggacaccaggcacaaccaaccaagagtcagggcccaaaaccaggaggcggaggcggaggcggatcctcacacacggctgcttggcagtctgggattcctcaagaggctaacgctggagtcaccacaccaccgagcaattccacaccacacagaaacgtggccatgcacgtccacagcagcaccactcacaacagccacccgaggaagcagcccagtgtccacggataggcgagtggaccagcatgtggcgtggcccatccacgtgccagaacacgacacagccatgaacagcagcgaggccgacctaggccacagcgcagacgcaccttgaggacgtcacgctctgtgagagacgccaggcacagatgtgtgtgatcccactactatgcactgtccaggacgggcccatccagagacagaaggggatgcgtgggtgccgggctggggcgaccctgcacccggggcccatttccaagtccccccacaacccaacacttcaggctgtgcccactcctgagaacgcccaccctctgcaatcccccaggacccgccactcctgagaacgcccaccctctgcaatccctcaggacccacagccctgcctttccgcccactgccagccccccatcgcctcccaccctgtcctcggccatatctcacaacccctgctgccccgatccccaggccctcccgcagcccccagcccctagccctgcctgcagactcggtcctgtccgagggcccacgcccccaagggctggctcccaccccatggtcctgagccctccggacccttcccccattgactccgccgccgtttcttgcagcagctgtgaccacgccatgtctctggggcatccagctgccccaatccccaggataaaccctagtgggacactgggtggggtcttggggcctgagaacaccccaacgcagcctctgccacgcagccccggagacgctctccccacgcggccccggagaccctctgccacgcagccccggagacgctctccccacgcggccccggagaccctctccccacgcggccccggtgacacggcccaccccgagcctcagagccacgggccagccaaacgtccagcgggcagcagagcgtgtcccctgcctggttttatttttgggcgcgagtcccatgactggagggatgcgtggtgtgggggttgggggggcgggggtcacacggttcccaccttgggagggggcccgcgctttatcagcacgctgacacccagaggggatgtggcttccttctgaaatcaggtcttcaagggagtcgttgtaaaagagaacgatgaaggtgctggtggcccagacaggacaaccactgggaaggcagaacctcagacaggaccaagatccgggagaatccgaggaaccgggtaactgtgtccgcctcccagctctctcctgagtccgggtaactgcgtccgcctcccagctctctctcttgagtccgggtaactgcatctgcctcccagctctctctcctgagtccggataactgtccgcctcccagctctctcctgagtccggataactgtccgcctcccagctctctcctgagtccggataactgtccgcctcccagctctctcctgagtctgggtaactgcatctgcctcccgtctctctctcctgagtccgggtaactgcggccgcctcccgcctctttcttctgagcctgctgaagtccccgtcttcctggctggacgccccagggtctcaccccacgctgtgcagcaacagctcagcctcctgatgttcagaactggccactgtgcggaccctccccctgggggtccctgagcacctgtcgtgtggagccccttcgcgcgctccgccctcagacccgagccgtctgcagatggggagctgtgtcctcggagcccggttctcctgccgtcctctcgccgagcagggttgtgacccccgcactttcggatgtggacacggaggcccctaggtggagccttgacgtgacccccagagccagactcagcagctcaggccacgctgtgcccacgttcgcgacggcaaagcggagaccctgagaagacactggccgcagagccataaccgagaccacgggaggacccagggcgcacggcacaccccagagcgctccgcccaggcccgggttctggtctcctggcacacccggcagcatctcaaggcctgcgccagcaaaggcggacatggaggtctgaggaggaggcggcgaggcccgggcgagcgggcgcgaccgtggtgatggagcccggcagaggccaccgcacagtccctggaggccgcattacctcagccgaggttctccgggcaggcacaaggcgctccctgcgtcccaggacctgaagatggcaaggagcaggcccccgggtgtcccgggaaccccgcacagagccacggccataagacagagcggacttgcggcctccggtgacctcacagccgtgatggcctcctgcagctgtgaccgccgccccacagccgcgaccccacctgcagccgtgaccccacctgcagccgcgaccccacctgcagccgtgaccccacttgcagctgcaaccgccgccccacggccgtgaccccacctgcacccgcgaccccacctgcagccatgaccccacctgcagccatgaccccacctgcggctgcaaccgccgccccacagccgtgaccccacctgcagctatgaccaccgcacactggcctccagatgggctcaagacagggcaatcaccctctacctggcgggcgcacaactcgcatcctaggaccgggtgcagggggcgggggctggcgatttcacaaggctcagctaatatggggcagagagccctgcaagctcaggcacctgggcaggccccaactcggccgccaggaccgtctggtggggaggacactgcaggccgtctcaggtcctgacccctgcagacagagcgcttcgtccctcaacatggagcccggggcaagggaggcctgaagggctggagccaagggagggtcagcccagtgagagaccttggggggacgggggtagcaagagggggtagcaagggacagttggggacagcaggggacagtggggggacagggggcagcaggggacagttggggacagcaggggacagtggggggacagcaggggacagtgggacagcgggggaagagcaggggacagtggagggacagcaggggacagtggggggcagtggggggacagcgggggatggtggggggacagcagggggacagtagggaaacagtgggggatagtgggggggcagcggcggatgggacagcggggggacagcaagggacggggtgacaacagggagacagcggggagatggggacagcggggggcagtgggggacagtgggggaacagcggggggacagtggggggacaggaggggacacattcaagacatccgtgaggttcccctactcctgggccaaggtgcctgcctgagaggacttcgccccccacagagctgggcagtggcagaggagggggccagggaagggaggtgggtgagggagaccccagagtgtccggcgctgcccctgcccacgccagtgctgctctctgcagccatcagcctccgggtgcccccgcctgccccgccacgcggccacattcccgcaccaccctctcacacgttccaccccaggggcagcacccgccctctggctgtgggtgctggtgggcagcttgcgcctggcacctgtttgtgatgggggaagctgccccggcagcgaggctgagggagcgggaagggctgggcctggcagaggaagagcagccgctcacccacatccctgcagcccggctggggcccagcaagccgctcacggtccccaggccctcatgggcagccccccacccactgggtacatccaacttcatgcaccaagagcccatgaagaaaccactcccacacccctgcccaggcctcggggggtctgcggggcggcctcacaggaggcccagtattacaatggcggccgcctggctgcagtgagtgcctggtggacacccccgaagggcagtggggagacccgggggaggacgcacagagggtggctacagaacagaggcagctggctggagccaccgggggtctcgtccctgcagccttcgcctcctgggttccagtgatttttgtggacccactgggggtctcggctcactgcagccttcgcctcctgggttccagtgatttttgtgcctcagcttctggagtaactgggatgacaggcacccgccaccacggcccggataatttgcgtattttagtagagaaggggtttcaccatgttgcccaggctggtctcgaactgccgatttcaggtgatccgcccgcctcggcctcccaaagtgctggaattacaggcgtgagccaccaggcccggcccgaatggaaatcattttcatagtaacatgaatctctgtaactcactagactgtggccagggaaacctgtgggcagctctgccaggaccacaagggggcatttgctctggacggcccctcccagggtgggcagggcccgaggacggaaagaaagggtggagggtcctgaggtgcttcccagaaagctcaggctgctcctccagccaggcacagccagaccgggagcaccgggaggtgggggtgggggtgcctgagcactggaggctggaggtgggggtgggggtgcctgagcactggagatggaggtaggggtgcctgagtactgggggtgggggtgggggtgcctgagtactgggtactgggggtaggggtgcctgagcactgggggtgggggtgggggtgcctgagtactgggtactgggggtaggggtgcctgagcactgggggtgggggtgcctgagcactggagatggaggtaggggtgcctgagtactgggggtgggggtgcctgagtactgggtactgggggcgcctgagtactgagtactgggggtgggggtgcctgagtactgggtactgggggtgcctgagtactgggtactgggggtaggggtgcctgagtactgggggtggaggtgggggtgcctgagcactgggggtacctgagcactgggggtggagatgggggtgggggtgcctgagcactgggggggtggaagtgggggtgggagtgcctgagcactgggagctgggggtgggggtgccttcctgtctcaacacagctttacctcttgggcccgatgaagcgggtctcaggatgcccaggacccacattttaggaacggccacgtcatactacgctttctacctctcctcttgaaattttctaaaagttctcaagtctgctgccaaggttatcagaactgcgtagggagctgtgtgggtcacctgtgaggcccggagcctccctgacgcaggtggtgggtgtcatggctctgctgtcttgtgaaagagtcgtcagtcaggcggcagggccaggagggtgaaagccgatccactcccttccctggggagccgcgggggggggggggggggggttgggccaggcctgcggggaggagccgacatacagcttccccagcagccggccagacagacggacgtcctggcccaaggtgagcgggcacggccacagatggcgcctggggcctttgcaggcgccctcctggccccgaggctgtggggctcctttgtgggggacacagggctcagggaccactccacaccctagacgggagcagggatggggtcttttaaagttaaggttttattcttttttaaaataata[136 bp omitted]atccaggcgtggtggcgggtgcctgtagtcccagctactcgggaggccgaggcaggagaatggcgtgaacccgggaggcggcgcttgcagtgagccgagatcgggccactgcactccagcctgggtgaaagagcgagactccgtctcaaaaaaaaaaaaagaaacgctgttgggggcaggagcctggatctcaacccctgcaaggtggaaatctggcttcctctcacccatacgagcctgccagaggcaggaggctgacgccccggagggaccagctgacatcggccttgagggaccagacttctccaggccggcaaccttctcccagctttgtgaggtggagcccaacctccagaccaagagaggccttcctgaccttcaaccccatctccagagctccccagagctggtctagcccctcatctgacacacagagaaacggagaccaggaacctgacgctggtttccctagcccatgtgaggaccctgtagaccagctacatgcacacccagtccagccgccggacagcgttcagtgggaagagagcagaccatcgtccacccacattccagactccaactggcagaggggaggggacgttggggctgcagggccaccaatgtggacgggacagagccccagggacagcctgtgctggggacgtatgggggcaggatcagaccccacagtgcctgcgggccacaaggccaagacaggatctggtaagtgacgatttggaggctggtcctgaggtgcaagagggagtgccagggacagagagggcaccggggtgactacagtccctccagactcacatctacccgcacctgtgggtggggccttatttgcatacagggtctttgcacacgtggttggttacaatgaggatgctggagggggtggtctgtgtccctgttaacaactcatgtccttaagagaaaagaggaacgtggacacccacacatcgggagacggccgcatggagacggagcagaggctggagtgacgcggccgcagaccaagggcgcctggagccccggaagctgggaggggcaggaagggtcctcccctggagctactccttgacctcagcttcctgtggcctccaggacagggacaggctgctctaagccacccagtttgcagcactgctgcggccgccacgagaagctcgtccagggaggaggctgctccagccctgagccccacgcgactcccgtgagcacgaggactcgggtgccctggggtgaggcggcacgaggctgtctgtggatttccacagcatcccaggaggcgtctggaccgcagtggctccaggctgccaaccacgggcagaggccaccgctcccgagcttggaccctgccacgcgcaggcacaggccaggcggcgccggggaagcctgggggccccagaccggcccagcaccgcctgacatttctcaagcatgctgggggacggcccctcaatttaggatgaggacgaggtgggcccggcaggagggcaggagccggggtccagggcgagcaagttctccccgccccacgaggaacggcagtggccccggttgcctggaggtggaaggggcactgcagcctcaccgccccataccccaggagcccacgtgcttctctcacagggaaaggtgtactggccagactcagcgccctgaggacggggtcggaacccagcgcccaggaagctcccctccccccgaccaaggacctccctccaggtgggtcctctggaaactcaggcccgcggccatcacggcccctctcctgggagggctcaagggtgttggccgtgggggcttcacactgcaccccgatttcgagggaagcccctgcccatggcttccggggccttccggaggggccaaggggctggtgccatgggagggaaagttcccaagctcggagatggccaggagcaggaacagcttgagcgggtggccgaactgacagcttctcttgccaaacctcctgtcctgctccagcacaaagcctcccccgtgcacaggaacaggtgctaggacactgtggggacgtcccagatgccaggggcagtggagacaggaggaggaggaggaggaggaggaggaggaacaggaggaggaggaggaggaggaggaggagaaacaggtgctaggacactgtggggacgtcccagatgccaggggcagtggagacaggaggaggaggaggaggaacaggaggaggaggaggaggaggaggaggaacaggtgctaggacactgtggggtgtcccagatgccaggggcagtggagacaggaggaggaggaggaggaacaggaggaggaggaggaggaggaacaggaggaggaggaggaggaacaggaggaggaggaggaggaggaggaagaacaggaggaggaggaggaggaacaggaagaggaggaggaggaggaacaggtgctaggacactgtggggacatcccagatgccaggggcagtggagacaggaggaggaggaggaggagcaggaggagggaggaggaacaggaggaggaggaggaacaggaggaggaggaggaacaggaggaggaggaggaacaggaggaggaggaggaggaggcacaggaggaggaggaggaggcacaggaggaggaggaggaggaacaggaggaggaggaggaacaggaggaggaggaggaggaggcagcggcggcactgtgggtcttccacagggtgtgcccggaggaggtcaagactccactgccctgaagcaaacaaggcgtccagcccgagccagggtcacacgcccaacaggtaggatccagcaacccctgcgcagcagcccccgccatgcgagggaggacccggagttgagcgtggccctgcctgacatctgaccccgccgtcaggagctccaccaggtcagggctgctcagctgaccccacagccccaccaggcatggtcagcacggtgccgaatgcaggcctggaaagggaataaaggaggccctggggaggggccttggtgcttcatcccaagccaaccccgaaagtggaagccacagggccagggggacgtcgtggctgagatgcgagcagggtgccgggcacccccaaggcagcactgctgtccctgagaacagaaggaagtccaggcccagagtcagagccaagtggagtagtggtggttgctggcactcagtcccgtacccttggacagagcaagagtcccaagccaggaatgtgaggccgatgccttttaggaagaaaccacatctggggaaccagaccccagatcccagaacccagacctcagatcccagatcccagatctcagaccccagatcccagacttcagatccctagatcccagaccccagaccccagtacccagaccccagatctcagaccccagaccccagatctcagaccccagatctcagactccagaccccagatctcagaccccagaccccagatctcagaccccagatcccagaccccagaccccagatcccagaccccagatctcagacccccagaccccagatcccagatctcagaccccagatcccagaccccagaccccagatcccagaccccagatctcagacccccagaccccagatcccagatctcagaccccaaaccccagatcctagatctcagaccccagatcccagatcccagaccgcaagatcccagaccccagatcctagatcccagacctcagaccccagaccccagaccccagatcccagatcccagaccccagacccccagatctcagatcccagaccctagatcccaaaccccagatctcagaccccagatcccagacttcagatccccagaccccagatcccagacttcagatccccagaccccagatcccagacttcagatccccggatccccagatcccagacccgagattccagaccccagatcccagaccccagcccagagggaggcccggtgagggagtggaaaggagattccacgacacaaatgcttatgcggaaacagcctccaggccgggctgcggggctccaaagcagggtccccatgctccgagcgggcctcactgctacctggcggttaaaggcctgtccgcctggacagggtggtgcggctttctgtggcagccaagcagcttccacgcggcttctgctgctgtgaggagcccgctcgggtcttgtgtttattttcagtcttttggggccagtgcggtggcccgtggctgtaatcccagtgctgggaggactgcgtgagcccaggaggtggagaccagcctgggcaacagagcgagaccgcaactgcacgcgcacacacacacacacacacacacacacacacacgctaaaagccacacacgctaaaaaccttttaacatgctgagcttgagcctgtggtcccctctaacctacacgtctttttctcctgagcagacgttaagctaaatccccactcactccagacttccggtcctttgaaatggaggtgcccttgtgtgtcttcaatccatgtggagggtagtctggcccatcccacacctgctactgtcactgcctcacatcagcggcctcaggccacaaggtctccccacctggctccttggggagtgccaagcgttgccagcagccgggctatgctgatcccagacaagtggctcgaccggtcaccactgtccttgagcttaagtccagccttggtgacaaaaatgtcacaaggacctgcatccgagccctgagggcatcaggtcctggaggaggaggaagagtcccttctggcttcgggctgggcttgaggacggcagctccaagaccgcttagagcgagacttcagcgctgactgctggagctacgcaccctgtcctgacaatggccgcacagttaggcgctgctccacgcctggaggagggaactgagggcccgaaatcacagaagcaggaactccaggttcgccagtgcggcctgatccaccttccctcaaacgtagctgctgacaacgacacccacgcgccctctctgggcccagcaggtcagaggtccaggtgggctggctgctccacggccacggctccaaggccaaggtcaaggcactgctgtcctgggccctggtctgggttctccgggagagtccgcgcctgagctcggccgggggcgggattctgctccctgtggccactgggctgaggccccacttccctgctttcggggagccacgtcccccatcacgccatccctccctcctaaaagccagcagggcaaggtccctcttaggcttctgacctgacctcccctcctccagctggagaagggtcccacgcatgaggacatttgtgacgatgccgggacccgaggaatccaggacgacccctctgcagagcccctgtgccccgggaggcaccacacccacggctccagggggtgggggggacggtggcttctctggggctgacccagacctgcagtacacagcgccaggccatgaggtctcagcctgcggtcaggccgcgtgcacggaaacccaggctcctgaacggccagccaggagcaaagccggccactgagtacgggagcaggctccggggacacgctcccactccttttaggggcccagaggctgtggatgaggagctcgagtatccccctctcagtgtaacctccccacccctcccacatcctccaagtggggcaggagccgcctcaccagagctgggggagggggccacacaggtgcacccctggggaggggcagcggagacttgtgggcaggaatgtggccagggtttctagatcatctggtttttcaagagaagccacaagtctgcgtttgagggtggcagcccctggtgttccaaagtcggcaagcaattcaagcatccacacccccaccccggggcagcgttgggtgcccagacctcagggccaccccgagagctcctgcatccacctgggggctcgcagctcccccaagctcctggcgggtagcagtcattccaggatctgataaaagcccccgaaaatgccccggtcagcccagccacacccgggcaacaccgacagccattctccaccagggccccagcgcccagctgagtgagacccacccggtagcttccggggctgggcccctgccccaccagtgaaaacattctggtcacagtgatgccgccctgagaagctcctcaccgtcccccgtggccttggaacccccctcacacccatgggttccaggcaccctggcggctgtctgtccccacgaagcctggccctctcacagcgtagggaggctgcggtcaccagcgtgggtcccgcgacccattccacccggcccctgggcaccggaagccaggcggcgagcgcagcagaccccagaggcagctttcctcagtttacctgacatgcaaaggaagacgcctcctcactccaggctggacgggcagccgacggcggtccggggccatggcgggcagggactttctccgtgaccctccctggctgcccctccccagcaagtgagtcagttccagaaacgtttactgcccgccaggcccgaaggctcaccggctccccctccccacgccccagcacccagggccttggccccaggagcccacagcggcagagactcccaggaaacgcgagtgagccgccttccggaacctggcgcacatcactttcaaaacgcagcggggcctggaaccaaggccaaggccgcctctttcggtttcacttggacgcttgttcttgctggggatggaggtcaatcacaaggctccgggaagcacgggcacgagtcacaaagcaggtcactgagacagcggcaccaggcccgccagtccgatctgctgaccccagccagggcccagcactcccatgccctgcactgcacgaggctgcccgggacagtgcctgcaggggagatgactcggcaatgactctctgggcccctcctcccaccccatcactcatggggttgtccagggcaagaggcccaggggaatccgcaggagagccagggcacagggcacgagtgcggccccaggctgaggcctccgtgggactgagcttcagggccacgctgccatgctgagctctcacggggcctccgcctggaccaccaggcaccctcaggctgactggcccctgtgtgccacccatgtggcccaaggcctgtccccctcatgccaagagccccgtagggccccttcgagtagaatgcagcattccctgcccctccgaagcagtgagtggttcaggggcagagctgggcctgggcgaggggcccccggggggtggggtgatgccatcactgttgccgtcctacgggttgagacaggacagctgcccatcaccccttgatgcaagctggctgcaggctgcctgaccagttcccggggacaccgtgctcaaccctgtggtgacaactggggattccgaaggacagggaggtcttactttctgttaaacacttttattttccctgagatacaatccacaccaggaggggcacctgtccggagcatatgactcaacggtttcaacgtattctaaggcagaccaccacagcttctaattccaaaacattccgctcccccaaaacacagccgtgtccccaacagcagtcactcccccgcctctacagcccctgcaaccacacgcccacttctcttctgtggactggcctgctctggacacgtgaccacacgtctaccccccatctgtggactgccctgctctgcacacgtcacatgaacggagtcacgtgccgtggccttttgcgtctggcgtctctccgcaagcacgtctccgcagagcatccatgccgggcgcacagacgacagatctaatctccgcctcctcacggggcccaggaggcccagggcgagagctgatggggcccacgcatccgaaatccccgtcttggccagaaccccaggtttgccttcgcccgcagggctgagccctctcctgagtcctgggccctgtgacgggtgaccacacctcccagcagggaggcaaggtgaccacggggctggcagtctgctcttcgtcccagcccgagggtgcaggtgccggccaacctcccgggggttgggggcgagagtgcagaggcgaggggcaaggctgagagtccacccacactgccgggcggacagcgggcaggccaggacgagaaccaggttggggtgacctcgcttttaggcttcaacccggcagctggacacacccagccctccccgtgtgctgtctgaccacacagccctcggctgtggaaaaagtgactggaggtattccaggcctgcccgcaacaaatcacacacacatgcacacagggacaggccacacacgtgcacacaacacacgcacacatacaaaacacacgtgcacaagacatgcacaagcaggggtgcatgagaacacgcagcacgcacacaacacacacaacggacacgtgcataacggacacaggtgcacaggcaacatgcgggcacacacaacatgcacacaaagtacacgtttgcatgagcacgggtgcaaaggtcatacacatgcacccacaacacaaacacacacaaaatacatgtgtgagcaacacacgcaagcatgggcacatgggcacaggcaacacacacatgagcacacacacaaaatacacacaaccaccaaaatacacacacacaacatacgaggacaggcacacaggcacgggcaacacacaaaatacagacacacataaccgactcatgaacatgggtacacacaggcacacacacaacacaaacacgggtgcacaggcacacacaacacacaaacacggatgcacagacacgcacacaatgtgcacccataaaacacacgcgtatgaaacacacgagcaacacacacatgcacaggagcacacagccacaggcacgcacattcacacacacacaacgcacccacatccgtacaacacacacacagaacgcgcacacgtccgtacgacgcacacacagaatgcacgtgcgtacgtacaatgcacacaaagaatacacacatccatacaacacacaggcacacaacacacatgtgcatgcacatggcgcaacatacagatacacaaagacacgtgtacacacacatgcagagtccccagggcagcgctggcgtcatggggggctgcctccacaccgcctccaggagtgtttacagctgtggattacatgataccgcccccttcccagagctgatcccaccccccagcatgggggccccctgggagggggcctctgggagccggactggttctgtcgacacagtcgcctctttgttcggggcagagctcactctggcggtgttggcgtttccgcatgggccctgccggaggggcatccgtgactccgctggagccgggttgggccaagcccaagctggtcacacccctcacacccctggggttgggggaggccttaggcagcaagtgggtggggggtctaggggtggctggcgcaacctctctccacctcggtttccccgccaggtgagagggcagtgactgcccatggtcacgcggctggagaacatgcaccctctcctccgcacctgcacacctgggtgcctcctgtctagcccagactccaaagccaaccaagagtgaatggatgaacggagaggccagaccccaaagcaaactgagagtgaatggatgagggaagctcctgctgcctcttctgtgctctgacaggctccctccccctgaagtccagcccctgcctgcacagccccctccacaccagggccctcctggctcctggcaggtgtgggcagatgtctgccgggatcctcagagttaaacaaaagcctcctccctgtgctctgaaatcacactccaggggctggcaggcgccttccaagtccttccctctccaaggacgagagcctgcctgcgtctcctctgccgtctcccctgccgtgggaggccctgaggcccccatcctgctgttctccatcccacccaccaaggggtccagatctcaaattcgccctttctcggcaagaactctgaaggtggcccggagcaggccactgtgagaagccatcaccccacgaccagggtcacccctgggaaaatctggggccgggcagccagatccctgaaggccagaggatgtctgggaagaaagggcgtggacggcacctgctgggcctgccacaaactctctgggtcccatgtccccgctgctcctcttccagggccgagtcagggagagacatcccagggagggcacccgaaacagcacagcacccctcagtcaggaagcagtgccggctgccctggcccggaggaagaggcctggaagaaagtttgaagcctgtaatccccgtgtaatcgggctggctgcccacggggtctgcggccctgggtcctcggcccctcccatgctcttctcttgaacctcggcttcctctgcccctctgtaaaacactcactgcaaccgccccccccgccccggcaaactggcagccagcatcagcacaggccagctccgaggccgggcactctcgctgacagggcgtgcaacagatggcaccaaacctatcccgtcccgtcccagcagtcacaggcaggaaggacgttctgagcaggcgggaacaacaggcattccgggaagaagcagccaggggaggccccggctacacatttaagagattttttttttttttttttaacttttcagaatgttaatcagttcatccagggagacacccaccgtccctgccccagcaccatccgtgcccggcgtccctggaggcgctgggtgggctctccacaacgcctgccccccacgccccaggtcagtctggggattggtccctccaggccccacctgccttattcttcgggactctggggtggtgggaagagtgccctacgggggacaggacccaccaggaggcctgcgcttccccttcaccgacacacgctgctcccgggccccactcgggccatctcagcccgctaccctccctcccgcctgtccctggaagccgggtttgaatgcgacccgcactcccacccccaacacgctctgcagactccgcccagacggccccggggtcacctaatatcagcaagcccccatcccaaaccgggggacctccatgcagaaaccgaaaaaccatctgccccagaagagaagtcggaggccccaggagcgggaggggcggggagcaaggggagggagggagacagggctgcgctgcggggccgagaaggcaagggtcctgggaccggggacaaggaggaggaaggggcacgaacgcccgaggagcctggagtcaggaatcggggcggcgggagagaccgggggtcactcccaggaaggggtcgaggtcacgaggcgcatggagtcgagagtccccaaaagggaaggccaggataccgaggaaaagcgggtgcggggtcaccaaggggctcgggggcaccgatgagtgcggggtcaagggttaccagaaaacgaaaggtcgggggtcaccaagctgcgcggtacagggagtcacccggaagagcgggaaggaaaggttgggagggttgtcgtggaaggtagggttaaggttcacggcagggggtcgccggggggcgggggggcaggtcaaggttcacggcggtggtcgcggggcagcgcggggtcaacgttggcggcgaagggcggggtcggaaggggtcgcggcggagggcgggggtcccgccgcgctcgcccccgccccacggcccccagaacccccagccccgggcgcaggggtccgcggggagcgccggacccacaagcggggtcgggccaggcaggggtcgcggtggagccggggcgggggtcgcaaccagagcctcacctcgggcccgggtccggccgggcgcggagcccgcggcgcctgtttctccgagcctcgcagctgccgccgctcacttccgggtttcgggcgccatcttgggggccccgcgcacttccggtcatgccgcggggcggggcctccacctgcgggggcgtggtctcggttcgggggcggggccaccttccaagccaatcccttgaggtccttccgctattcggaaggggctgggactcctacggctctgggttcgaatcccgccctgcctggttctcttgagaccccagcatgtgctttcacctcctcaagcctcagtttcctcttctgcaccgtgctggtgaaatggaatctgctttgtggtacagcatccccttttttcctccttcctcagaaccccctccaagcctctgcatgtgccacgtcccccactggggctcactcacccgagacttttaaactgagactccctcaaaagctactaagacgatcaccagccgggcgcagtggctcacgcctgtaatcgcagcactttgagaggctgaggcggatggatcacttgaggtcgggagtttgaggccaacctggacaatatgatgaaaccccgtctctactaaatatacaaaaattagctgggcgtgatggcgggcacctgtaatcccagctactcaggaggctgaggcagtagtatcgcttgaacctgggaggtagttattgcagtgagctgagatcgcaccactgcactccagcccgggcaacagagtgagactccatctcaaaaataaataaataaataacgaaataaaataaaatgaaataaaatcatcacctctgggcctgtcagacatactctctcacgaaaagttatctctgttcattaatctctctccctaaccaaatacagttctggacgcttcagcatggtgactggcacatgggggtttgggtaagtcccaggggctacccccaagagagcaggatcctttcaggcagggccacgggggcctgaggggctcctcctctcggtggctgtggtgggaggctgccctgcgtggggagctggagtctcagggcacttttcctgtgacttgagccagtgaaggcagatccagtgtgggaggcaccaccgcctccccagcccaatttcagccatgacaatactgatacagctccctggacccaagcagccacaagccagaggcctctgcccccattccaaccccctgaaactagagttgatttctccatgactttgttaattcattcagtgacttctaatcgatgctgctctgtgcttggtcatgagctgggaaaacccagggtctcacagaggactcagctgtctgtcccaacatcagaaagcccctggtctaggggagagagaaccaggaccagacactccaatatgcgggatctctgggagggttgaaatgtctgcctagggcttcatagagggctgcatgctgaagagtgtgttgaagctggggttttgaagttcaagtaggagtgtaccaggtagacaagagtaggaagaacagtccgggcaaagaaggcctggtaaggcagataataagcaggtttaagatattttagcacctctctaaaaaactgaggccaaaagccaggcacggtggctcacgcctgtaatcccagcactacgggagtctgaggcaggaggaacacctgaggtcagcggtttgagaccagcctggccaacatggtgaaaccccatctctactaaaagtacaaaaaagttagctgggcatggtggtgcctgcctgtattcccagctactagggaggctgaggcaggagaatcgcttgaacccaggaggtagaggttgcagtgagctgagatcacaccactgcactccagcctgggcgatagagtgaggttcggtctcaaaaaaacaaacaaacaaaaaacggtggctcacgcctgtaatcccaacactttgggaggctgaggtgggtgaatcacctaggtcagaagttcaacaccagcctgacgaacatggtgaaaccctgtctctactaaaaatacaaaaattagccaggcgtggtagtgggtgcctgtaatcctgactactcaggaggctgaggcaggagaatcacttgaatctgggaggcggaggttgcagtgagctgagatcgcgccattgcactccagcctgggtgacatgacaagaccccgtctaaaaaaaaaaaaaaaaaaaaaatttcaggccaaggacccctgtcatcaaacccaaaagcacaagggggcagatggggaaactcagacccagaaggcagaagtgatatgtccagagtgagatgcagaaggcgcacaaggacattttgtccttcagctcattgggggtctcctttacccatggtgacagaacggcgtccacctgttgtgagcttttcctcagagtcccgcagagcagccggacccgacagagatacttc[132 bp omitted]cct[175 bp omitted]cccggccaaatctccttttttttgagatggagtcttgctgtgtctcccaggccggagtgcaatggcatgacctctgcctcccggttttggcaaactgggtgctcatctcaactttgagactattttctcttttttttgagatggagtttcactcctgttgcccaggctggagtgcattggcgcaatcttggcccactgcaacctcctcctcccctgttcaagtggttatcctgcctcagcctgccaagtagctgggattacaggcatgtgccaccatgcccagctaattttgtattttccgtagaaatagggtttc[133 bp omitted]gttaaattgagcaataggcactaaagatttggaagggtgaggaagccagcctggggactggagggtggcggctgcatctgctcatttcctcccacactggaccatccacacaacttttgaggatcagtggaaatgaaaacacggtgccccggcacaaaacatatttcatagcttgggttaggcaacagcaaagcatcacgctgagcgccgggaccttctgagtgcaggcggtgggcgaagccccgagtcacacacacccacgacgccggccctgctcccacagcggccctctggggtagcgactggtattacctgcatttcacgagggaggaaactgaggcacgaactgttcagaagctgccctgaggtcaccaagtgagctaggaagaggcgtgggctcgatctctgccacatccacctcgggaaaccacaaggtctcgatgggtgattttgcctaaagtgggggcagtttgcccaggccggggtgggtccagccatctcagcaggcaggaatctgccaagttgggggatgcttagggaattagtcagatgcggggatttccagggaatcacagggggtggctccggaaagcagcagggacacagtactggggctcatggcccagcctggagtacagtgctgtgaatctgctgtgtgacccaaggagagttacttaacctctctgtgccccggttttcccacctataaaatggggagggtgataataatagcaactagtggccgggcacggtggcttatacctgtaatcccagcactttgggaggctgagacgggaagatcacgaggtcaagagattgagaccatcctggataacatggtgaaaccctgtctctactaaaaatacaaaaataagccggacatgatggtacgtacctgtggtcccaaccactccggaggctgaggcaggagaatcgcttgaacccgggaggcggaggttgcaatgagctgagatcgcaccactgcactccagcctgggcaacagagcaagactctgtctcaaaaaaaataataataatgataataataataatagcaactagctgctaggttgttcagacaactcaatggacagacagtgcctaatagaatttaaccactacgaatatttccaaatgaaattctttttttttttttttttgagacgaagtctggccctttcacccaggctggagtgcaggggcatgagctcaacttagtgcaacccctgcctcttgggtccaagtgattatcttgcctcagcctcccaagtagctgggattacaggcacgtgccaccatgcccggctaatttttgtattttcagtagaggcagggtttcaccatgttgaccaggatggtctcgagctcttgacctcgtgatccgcctgccttggcctcccatattgctgggattccaggcttgagccaccctagggaaattcttgattttcctcggcccagtccatggcgtcactgaagtggatgttcaatgagaaaataataaggatgaatgctgcagttggagttcaagagaggaggcatttttgacgccacagatgggcagagatggggtgagggccctggccggcaccagctctcctggctcagactttggaagccgccccccaggggagacgctcaactggtcagaggtgtggatagccccgtcccccagtagtcccaccccgcagagagctctcaggcttccagctctggcccaggcccaggtcctcggtgccatgtgaagggtggagagctctcctgggggacagagttgtacatttgtggaggttttctggtggggctgtgtttgacgtcaacactctcctccctaaaccctccctcttccccatcccatacaggtcctcctaaatgtcttcccagccccttcgagagaattgtggaagtggggttgccagatcaaacacaagacacccagttaaaattcaactgtaggtacgtgacgagtactttttgttgctgctgctgttgttgttcttgttgtttttgagacggagtctcgctccgttgacaagaaggctggagtgcagtggcgcgatcttggctcactgcaacctccacctcccgggttcaagtaattctctgcctcagcctcccgagtagctgggactacaggcacccgccgccacacccggctaattttttgtatttttagtagagacggggttccaccatcctggccaggctggtcttgaactcctgacctcgtgatccacctgcctcagcctcccaaagtgccaggattacaggcgtgagccactgcgcccaggctttgttgttgtttgagactgggaatcaccctgtcgcccaggctggagtgcagtggtatagtcacagcccactgcagcctctgcctgctgcgctcaagcaatcctccccagtcagcctcctaagtagctgggactacaggtatgcaccaccatgcctggccaatttttttactttttatagagacggggtttcaccattttacccagattagtcttgaactcctgagctcaagcagtcctcccaccttggcctcccaaagtgctgggattacaggcatgagccatcacacctggcccatttctttctttctttctttctttctttctttctttctttctttctttctttctttctttctttctctctttctttctctctctctctctatttccttctttctttctttctctctctctctctttctttctctctctctttctttcttttttttgtagagatggggtcttactgtgtcgcccagcctggtctcaaactcctggcctcaagcaatccacctgcctcggcctcccaaaatgctaggattacaggcatgagccactctgtccagcctgtcttaattatttcaaattgcagaaaacttcagacaaacatgaaggttgtttgtaaggaccttcttgggctgtgcctcagtttccccatctgggagatgccagcctggattcccctcccggcctcagtgtctctcctgggcggcaagaaggaccctgggactgtgcccactctgccgtccagggggccgagggaggtgcccagggagggggaggtgcgtggtggtgacgggcggctcccgcacagagcctcagacctgggcaggtgaggcaggcaggtgggtctggcccggcgcggcccgatgcgggggcagggatgggatggagccacttcctgtttctccacattctggaaagtccctgtgttcccaggcagagggggcacctcctccctgccagccctcctgggcgccgggctcctcaccacttctccttcctccacccacttccccagcggacgggcctgggacccgccccttcccctcctgcctctctcctcttttctttcccaatcaggcccttcctggtgtgcagaagggaaagctgattccacagcagctgggcctgcccgacccaggaggctacatctgtcacccctctgtctgtctctgtctctgtctctatctgtctctctgtctctctctgtctctttctctgtctccttgtctgtctgtctctctgtctccatgtctctctgtctctctgtcttcgtctctctgtttctggctctctttgtctctctgtgtctcagtttatttctgtctctttctgtgtctctttgtctgtgtctctgtgtccctctgtctctgtttctctggctctggctctgtgtccctgtctgtttcttttttttttttttttttttttttttgagagagtctcgctctgtcccccaggctggggtgcaatggcgcgatctcggctcactgcaagctccgcctcccgggttcacgccattctcctgcctcagcctcccaagtagctgggagtacaggtgcccgccaccacgcc[187 bp omitted]tgtctctgtctctgtgtccctctgtctctctgtttgtctctctctgtgtctgtctctgtctccgtgtctctctgtctctgtctttgtctccctgtctctgtctctggatccctctgtctgtttctctagctctctctttgtctctgtctctgtttctctatctctgtctatctctgtctcagtcccttcttttgccaccatccccctcccgtggccgccctcacgtgtcagcaccataccctccctgtggtcagggccacctgctccagggtgtcctcaggtcggtgctggccggcgtgttcccgggccctgcagccacctgcttgaccagggccaggcccagagtgagatcctaccaggccaggtcggggcagcctctgtgccaagacaactttagggaacaacaaacctgtctgacgggtttgagattccacatgggacaggctttctcacctccgcactgacgctaggacagctgggttgaaggggcccagtgacacccctgacatagcacctcaggctgggtacaggctgcagcagcctagtctgggtcagggctgtgtcctgaggttggggcacccagggcaggctgggtgaaggaagatcagcaatctgccggtcgccctgtgcagggaggataaacagggagaaggcactgcacatgcaaagtctcagcggggacaaagactcaggggagagtgtgcggggcctggggtgtgaggatagatggactgggagagagagaggggaccctggagggcctggaagctagacgtggcctgtattctgggggcactagggaaccattgagggttctggagcaacggagtggtacagtcatggtggggctagcggtgtactggatggggtgaggcacagggaccgaatttcagatcagaaggctcatctggtagtcagactgaggccggaggaggctcaactgccccgaggatgaagaaaggagccaaacttggccgggtgcagtggctcacgcctgtcatcccagcactttgggaggccaaggcaggtggactgcctgaggtcaggagtttgagaccaacctgccaacacggtgaaaccccgtctctactgaatatacaaaaaaattagctgggggtggtggcgggcgcctataatcccagctactcggcaggctgaggcaagggaattgcttgaagcagggaggcggaggttgcagtgagccgagatcgcaccactgcactccaccctgggtgacagagagagcaagattctgtctcaaaaaaaaaagagccaaactttgaacttcttttttctttctttcttttttttttctattttgagacagggttttgctctgtcgcccaggctggagtgcagtggtgtgatctcggctcacagaacccttgaactccttgcctggagcaatcctccctcctcagcctccagagtagctgggatgacaggcgcaccactatgcctggttaattttaaattttgttggccaggcgcgatggctcatgcctgtaatcccagcactttgggagaccaaggcgggtgagtcacctgagatcaggagttcgagaccagcctcaccaacgtggtgaaaccctttctctactaaaaaaaaaaaacaaaaacaaaattagccaggcatggtggcacgcacccataatcccagctactcgggaggctgatgcaggagaatcgcttgaacccaggaggcggaggttgcggtgagccgggatcgcaccactgcactccagtctgggcgaaagagcgagactccgtctcgacaaacaaacaaacaaacaaacaataaataaataaataaaccttgtttgtagtgaagaggtctcactgggttacccaggctaatcttgaactcctggcttcaagtgagcttcccacctcggtctcccaaagtgctgagatgacaggtgtgagccgctgcacccggcctgaacttcctatcaggtgctcattatgagccaggattgagctacagaaaatgcgagggaggggagacggcccccaggatgcccccaaaccggtactctgcaccccctgggcccacatctaaggacgacaaggcagaggcctcaaatgccaggtcctgtggctttgtccccggggcggtggggagccacgggcagaagtagggcaccagaggagattgctctgccagggctggggccagagcaaagggccgggggcagggcaggggcgttggatcgttggatggggctgcaaggtggggagggcaggttggggccatgtattcatccgagatgaatttctcagtgccacccagggccaggccccacttgcaggtgccagggccactacagagaacagacacaccctgagggggtccccaggccacgaagaagccggatgctggagcagcctaggacacagacaccttggcccttcccaggcaggcccctgccacgtgagtgcagggcaagggtcccaggagggggaacgggctccaggccccaccatggctgccctgagtgtacgcagtggtcagcccagtgctgatgtcacctgtgtggggacttcctggaccttcacctcggatccgctgcccggccccgagggaaattccagagaagccagggccgctcctggctgactcattctaggtgccagtagcacgggaggggctgggcaatggagggcctgggggcatttggagaactgtgaggagtctgaccacctcctctgagggccagtttctgctgcgtcccacggggacttggggaaaacttggactccccagccccagccctggcatcattttttttttttttttgagacagagtttcactcttgttgcccaggcatgggtgcagtggtgcgatttcggctcactgcaacctcagcttcccgggttcaagtgattctgtcgcctcagcctccccagtagctgggattacaggcgcctgccaccgcgcccggctaaattttgtatttttagtacagacagggtttcgccatgttggccaggctggtcttgaactcctgacctcaggtgatccacccgcctcagcctcccaaagtgctgggatgacaggcgtgagccacagtgctcagcccaggccagcatctacagggcacaagtgggaatctgggttctaggaggtgagaactggggggtggggggttgcaatgggtggagagtgctttcccttccctgcaggccttctcacgtccacagggttgcaagcgggactggcagagttgaaacaaaagtcagggagcagggctgggcgcagtggctcaagcctataatcccagcactttgggaagccgagggaggctgatcacctgaggtcaggagttcgagaccagcctggccaacatggagaaaccccgtctctacaaaaaatacaaaaattagccgggcttggtggcgggtgcctgtaatcccagctactcgggaggctgaggctggagaattgcttgaacctgggaggcggaggttgcagcgagccgaggtcgcaccactgcactccagcctgggtgacagagcaagactccatctcaaaaaaacaaaagaggagtgtgggaacaagtagtgaagatttccaccgttcaaatcccgccactcccccccggggctctgtgacctcaggaaggcacatgacctcccacacttcagtttgcccatctataaaatgaggataatcgtggtacctcctttggaagccttttgtgagaatttggtaagttctggtatgtgttaagtgtttggagtggggcttggggtatggtgaag[137 bp omitted]aagccctgtctctagtataaatacaaaaattagccgggggtggtggtgcacacctatagtcccagctactgaagaggctgaggcaggagaatctattgaatctgggaggcagaggttgcagtgagctgagatcgcgccattgcactccagcctgggcgacagagccagactccacctcaaaaaaaaaaaaaaaaacaaacaagaatcgtttggttgcagctgacagaaattgaaactacaactggctcctttttaaaaaacaggaattttttgctcatggaactgaaagatttagggatagagctaactcaaggccacccctctcagcaccgttgatgttctggaaaggaccattcactagggtgggggccgtcctgggcacacagggtgctcagcaatgaccctggcctccacccagtcaacgtctgtagcgtccccacccggtcatggtgaccaaaaacatctccagacattgctgagtgtcccctgggggtgtaatcacccttggttgagccctactggtctggcgggtttcagacacagctggatccaggaccctcggtcagtgtcacaaggatgtgtccaattctccatc[132 bp omitted]ctgcaacctctgcctcccgggttcaagtgattctcctgcctcagcctcccgagtagctgggactacgggcgtgcgacaccatgtctggctaatttacgtatttttagtagagatgggcttttgccatgt[137 bp omitted]ggaaaagatgatgccataagccccaaatctcatctgcccatcatcttaacagccctggcaggagtcaacacctcttcccaaggtgggggcaccaaagtgccagggaggttctcattcgcccagcctgggtcacatgtcctggtgggctgtggcctggtaaggggatgcccagattggccaggcagggatcacatggttgtatggagtgagccaattgggtgaaaactcgtggtcgggatgggcacggcggctcacgcctgtcatcccagcactttgggaggccgaggcgggcagatcatgaggtcaagagttcgagaccatcctgggcaacatggtgaaactttgtctctactaaaaatacaaaaattagctgggagtggtgttgcatgcctgtaattccagctactcgggaggctgaggcaggagaatcgcttgaacccgggaggcggagcttgcagcgagccgagatcgtgccactgcactcccagcctgggcaacagagtaagactctgtctcaaaaaaaaaaaaaagtacaaaacatgagccgggcatggtgacgcacacctgtggtcccagcaactcaagaggctgaggagggagaatctcttgaaccaaggaggtggaggttgcagtgagctgagattacatcactgccctccgg[141 bp omitted]tggtgaaaccctgtctctactaaaaatacgaaaattagctgggcatggtggcggatgcctgtaatcccagctactcgggaggctgaggcagagaattgcttgatcccgggaggcagaggttgcagtgagctgagattgcgccactgcactccagcctgggcaaca[218 bp omitted]gaggcaggagaatggtgtgaacccgggaggcagaggttgcagtgagccgagatcgcgccaccacactccagcctgggcgacagagctagactctgtctcaaaaaaaaaggaaataataataataacaaaaaacaaaaacaaaaaaaccctcctctatggacagaggcatgattggcaggggtgggatagctgttggcaaagaaggcccagctgtgctaagcaggccacccatcccatggaagggctggcatggaggcagcaccagtagacatcagaggatgaatgagtgggatccagtgctgctcaatgaatacatgcgggttgttttgtttttgtttttttgtttttttgagacagagtcttgctctgtcgcccaggctggagtgcagtggcacgatctcggctcactgcaacctccgcctcccgggttcaagcaattgtccagcctcagcctcccgagtagctgggactacaggcgcccaccaccacacccggctaattttttgtattttcatttgtttgtttatttgtttgtttgttttgagatggagtctcactctgtcgcccaggctggagtgcagtggcatgatctcagctcactgcaacctccgcttcccaagttcaagtgattctcctgcctcagtctcccaagtacctggaactacaggcgcccaccatcacacccagctagttttttttttgttttgttttttgttttttttgagacggagtctcactctgtcgcccaggctggagtacagcggctccatcttggctcactgcaacctctgcctcttgtcttcacgccattctcctgcctcagcctcccgagtagctgggactacaggtgcccgccaccaagcctggctaatttttttttttttttgtatttttagtagagacagggtttcaccg[272 bp omitted]ttgagacacagtcccgctctgtcacccaggctggagtgcagtggtgcgatcttggcccactgcaacctccacctcccaagttcaagcgattctcctgcctcagcctcccgagtagttgagattacaggtgcgcaccaccacacctggctaattttgtatttttagtagagacgggttttctcatgttggccaggctggtctcaaactcctgacctcaagtgatctgctcacctaagcctcccaaagtgcagggattacaggtgtgagccactacacccagcctcttttttttctttttctttttgagacagggtttcgctttgccatgcaggctggagggcagtggtgcaaacagggctcacaggcagaggctgctctgcctcctaggatcaagggatcctcccaccgcagcctcctgagtaactgggattacaggcacaagccatcatgcccaggtaatagttttaaggttttttttagtagagatggggatctcactatgttgctcagcctggtctcgaactcctggcctcaagtgatcttcccgcctcagcctcccaaagccttgggattactgggtgagcccccgtgcccagccagtggctgcttgcactggctggcctccaaagctgaaagtatttgctccctggcccttaacagaataggtgggctgacccctgctctatgtggttctttgtccccaggcaaggattcagggacatctcagagccgctggggtctcgtcggtaaagtggtggtggacggcatggaggaactttagccctggaccagaaactttaggtcagtctatgtcagccattgttgctatcagccttcaggtcgtctgggctgggaggtctcctccctcttcctccaggcaccagtgggagcaggcagtcacaccttcctgtgagtgagaaccatagcagaaccttcaaagcacctctcaagtcgggtgagtcagcagaggcctgcagacagggttgacgggggcagggtgtggggatgtgggagacccagactgggggccagcaaaggctgttcggaggaggtgaccactgagctatgacctgaatgagtgaacgaggcagttattttatttttttgagatggagtttcgctcttgtcgcccaggctggagtgcagtggcacaatctgggctcactgcgacctccacctcccgggttcaagcgattctcctgcctcagcctcctgagtagctgggattacaggcggccgccaccacgcacagctagttttgtatttttagtagagatggggtttctccatgttggcca[132 bp omitted]gggaggagcctttgaggtggcaggagggaaccagtcctgatgagggaagattaaaggacagtggggctggggatggtggcccacacctgtgtttgcagcactttgggaggctgaggcaggaggatcactagagcccaagagttcaagatcagcctggcctacaaaaaaatatttaaaaatttgctgggtgtgggaggctgaagtcagaggatcacctgagcccagggagttggaggctgcagtgagcggtaatcatgccactgcacttcagcctgggggacagagtgagaccctgtctgaaaaaaaaaaaaattgggccaggtgcggt[169 bp omitted]gaggcaagagaatggcctgaacc[143 bp omitted]gaggcaggagaattgcttgaacccgggaggtggaggttgcagtgagccgaggtcgcaccattgcactccagcctgggcaacaagagcaaaactccatctcaaataaataaataaataataaaaaaataaaaaataaagagggtgggcatgatggctcaagcctgtaatcccagcattttgggaggctgaagcaggtggatcacttgaggtcaggagttcgagaccagcctggccaacatggagaaaccctgtctctactaaaaatacaaaaaataaaataaaataaaataaaataagccaggtgtggtggcgggtgcctgtcatcccagctaactgggaggctgaggcaggagaatcacttgaactggggagaaggaggttgcagtgagccaagacagctgcactgccctttaacccaggcaatagagtgagactatgtgtcaaaaaaaaaaaaaaaaaaggacattattagagttggaaggaaatgaccataggcccagggttccacggtccagaccaccacacacaactgatgcaggatataaccgagtcattccatcccaggtaatacccaagtacccacgggaggatcaacatccacggaaaagcctgtgtacaaatttcatagtagcaaatgcttctcctatgcgtcttttttttttcttttttcttttttttttttttgagacagagtcttgctctgtcacccaggctggagtgcagtggcacgatctcggctcactgcaagctctgcctcctgggttcaagcaattctcctgcctcagcctcctgagtagccgggactacaggcgcgcgcc[131 bp omitted]caccgctcccggacacgtctggctaatttttttgtatttttactagagacgaggttttgccgtgttccccatgctggtctcaaactcctgggatccagtgatccacccaccttagcctcccaacatgctgggattacaggtgtgagctactgtgtccggcccaaattgtctaatttttaaaaatagtttctgggttatggatctgaataaagcgtgcaattagtgaacagtttataaacctcttgtgtgcttttaatttattttattttatttatttatatatattttttgagacagagtctcgctctgtcacccaggctggagtgcagtggtgcgatctcagctcactgcaacctctgcctccagggttcaagcgattctcctgcctcagcctcacgagtagctgggattacaggtacctgccagtatgcccggctaatttttgtatttttagtagagatggggttttgccatgttggccaggctggtctcgaactgctggcctcaagtgatcctccctcctggccctgcacagtgctgggatgacaggctgagccacctcaccggcctcttatgtgccttttaatctgcaggttcgccctccctctctctttctgtggtttgtttttgtttttttttttctttttttcttttgtatgaaacccagttgtttttcctgttaagtttcccacagtctagaatttgctgatttttttctgtgataatttaagtttttgaatagtgatgcattcccgtgtcgtaaaactgaagagtcaaaagcatacccagactgcagccgctggggaagagtgtggtagctccacaagaagttaaacggaggcggggtacgggggctgggcgtggaggccgggcgcaggggcggatgcctgcaaccccagcacgctgggaggccaaggcgggcggatcacttgaggtcaggagtttgagaccagcctgactaacatagcaagaccccatctctacaaaaaatacaaaaaaattagctaggcatggttaactgctgtttttgtcaagatgggttattactatgttgcccaggctggtttcaaactcctgtcctcaactgactcagaaggatcaacttagcccaggagttcaacatagcgagaccctgtctctacaaaagaaatgttaaaaaaattaaccaggcctggtggcatgcacctgtactcccagctacttgtgaggctgaggtgggaggactgtttgagccatggagtctgaggctgcagtgagctacgattgcacctggaacccaggcctctcccgtctggaacccaggccctcacctacactgtcagcccctccacctggaacttgtagaacttacctgtaagcccaggcttcacctgaaaccccagtcccccacctggaacccaggccctcacctacactgtcagcccctccacctggaactttagaacttacctgtagccccagccttcacctgaaaccccagtcccccacctggaacccagtcccccacctggaacctgggcctccccaacctgtaacccaggcccccacctagaacctgggcctctgtgatctgtaacccaggccctcatctggaacctagggctctgtggaaactgtggcactcacatgtaaacctggcttccacctgaaaccccagtcccccacctgtaatccagcttgggt[144 bp omitted]aaacacgtctctaataaaaatataaaaattagctgggcatggtgatgggcgcctgtagtcccagctactcgggaggctgaggcaggagaatcccttgaaccgggagacagaggttgcagtgagccgagatcgtgccactgctctctagcctgggcaacagagcaagactccgtttcaaaaaaaaaaaagggaataaatgtcatgttacatatattttatgagaattctaaaatatattttatggcagggcacagtggctcacgcctgtattcccagcactttgggagtctcgctctgtccccaggctggagagcagtggtgcgatctcggctcactgcaacctctacctcccgggttcaagcgattctcctgcctcagcctcccgagtagcttggactacaggcgcccgccaccacgcccggctaattttttgtatttttaatagagacagggtttcaccgtgttagccaggatggtctcgatctcctgaccccgtgatctgcccccctcccaaagtgctgtgattacagacgtgagccaccgcgcccggcctattattttttactttttttttttttttttgaggcggagtcttgctctgttgcccaggctggagtgcagtagcatgatctcggctcactgcaaccaccgccttccaggttcaagcgattctcccgcctcagcctcccaactagctgggattacaggtgcccgccaccacgcccggctaatttttgtatttttagtagagatggggtttcaccatgttggccaggccggtcccgaactcctgacctcaggtgatccacccgcctcagcttcccaaagttctgggattacatgcgtgagccaccgcgcccggcctatttttcacttttttttttttagccgaatgtggcgaggacagttatcggattatttgcagcggatcctacacgtcccctcctcctgcctcttgccctgcgctcccgaaggggcctccggacccggaggatctcaccgcggggcggggtccacggcgagggggctcggccaagcgggcagcctcgcgcacgcgcactcaacccggacgcgggcctctccgccgcagcccgcgcccgccacctggcggccacagcggtccgcgcagaccgccggccccttttctatccgcgaccggatacctggcaggggtctaggaaagacccctctggctgctgcggggccagtgcgtgcgaggctcgaccccactccattgcgtgggggggctgagctaggtccgtgaagcggggcggttgcgatcaaggccccgactttttttttttttttttttttttttttttttttttgagacggagtctcgctctgtcgcccaggccggactgcggactgcagtggcgccatctcggcgcactgcaacctctacctcccgggttcaagcgattctcctgcctc[224 bp omitted]acgggtctgcggccagagagaggccaggagggaggactggcgggcatttctccgcagggtgggggtgaacgggggcctgggcatcggagccggggggaacgtggggtcagcgaggggttctaggggaggaaatggtaggagagctcctgccctgcaggctggagggcaggatctgtgtgtttggggggagtcatgggtgggtaggagagatgacaggtgacagcctggaggaagagatggagggaggcttgagccctgggcggggctggcagaagcccccacctataacttgggacctctgaacctggaacccagcccccacctgggacctgggcctctcccatctgtaacccaggccctcacctagaacctctgaacctggaacccagcccccacctgggacctgggcctctcccatctgtaacccaggccctcacctagaacctgggacctctgaacctggaacccagcccccacctggggcctggaacctccaccaggaacttgtgccc[224 bp omitted]gaggcaggagaatggcgtgaacccgggaggtggagcttgcagtgagccgagattgcgccactgcactccagcctgggcaacaaagcaagataccgtctcaaagaaaaaaaaaaggaaaacccagttccccacctagaacccaggccccgacctgaaacctgggcccctccacttgtaaccagggacccccacctagtatctgagcctctcccatctgtaacccaggccttcacctagaacctgggcctctgcaagtgtaacctggggttcctaccaggaacctgaggccctcatgtgtaacctgcggcccccgacctggagcctgggcctctctcatctataacccagaccctcacctagaacctgggcccctgcaactgtaacctgtggcactcactgtaagcccggacttcacctgaaaccccagtcccgcacctgtaaacctacaccccgccaggaacctgggcctctccaacctataattgaggccctcacctgtaacttaagcccacacttgtaacctggggctctctgctataacttggggcccccacccataagccagttcccttaacagaacctgcagtttggtgaggatgagagaatgcaaagaaagcattttccccaggactaccataaatagtcataagcatcactttttcctattaccatagcattaccatttgtcacggtttacccacccgaggtcactctgcctctttttcactttattttttttttatttttatttttttgagatggagtctctctctgtcgcccaggctggagtgcggtggcgcgatctcggctcactgcaagctccgcctcccaggttcacgccattctcctgcctc[224 bp omitted]acgggtctgcggccagagagaggccaggagggaggactggcgggcatttctccgcagggtgggggtgaacgggggcctgggcatcggagccggggggaacgtggggtcagcgaggggttctaggggaggaaatggtaggagagctcctgccctgcaggctggagggcaggatctgtgtgtttggggggagtcatgggtgggtaggagagatgacaggtgacagcctggaggaagagatggagggaggcttgagccctgggcggggctggcagaagcccccacctataacttgggacctctgaacctggaacccagcccccacctgggacctgggcctctcccatctgtaacccaggccctcacctagaacctctgaacctggaacccagcccccacctgggacctgggcctctcccatctgtaacccaggccctcacctagaacctgggacctctgaacctggaacccagcccccacctggggcctggaacctccaccaggaacttgtgccc[224 bp omitted]gaggcaggagaatggcgtgaacccgggaggtggagcttgcagtgagccgagattgcgccactgcactccagcctgggcaacaaagcaagataccgtctcaaagaaaaaaaaaaggaaaacccagttccccacctagaacccaggccccgacctgaaacctgggcccctccacttgtaaccagggacccccacctagtatctgagcctctcccatctgtaacccaggccttcacctagaacctgggcctctgcaagtgtaacctggggttcctaccaggaacctgaggccctcatgtgtaacctgcggcccccgacctggagcctgggcctctctcatctataacccagaccctcacctagaacctgggcccctgcaactgtaacctgtggcactcactgtaagcccggacttcacctgaaaccccagtcccgcacctgtaaacctacaccccgccaggaacctgggcctctccaacctataattgaggccctcacctgtaacttaagcccacacttgtaacctggggctctctgctataacttggggcccccacccataagccagttcccttaacagaacctgcagtttggtgaggatgagagaatgcaaagaaagcattttccccaggactaccataaatagtcataagcatcactttttcctattaccatagcattaccatttgtcacggtttacccacccgaggtcactctgcctctttttcactttattttttttttatttttatttttttgagatggagtctctctctgtcgcccaggctggagtgcggtggcgcgatctcggctcactgcaagctccgcctcccaggttcacgccattctcctgcctcagcatcccgagtagctgggactacaggcgcccaccaccacgcccagctaaattttgcattttttagtagagacggggttt[132 bp omitted]caaatttatgaattcaaggccaggcttagtggctcatgcctataatcccagctttttcggaggccaaggtaggtggattacttgatgtcaggagttcgagaccagcctgggcaacatggtgaaactccgtctttactaaaaatacaaaaattagctgggcatggtggtgggcacctgtaatcccagctactcgagaggctgagacaggagaatcgcttgaacccaggaggcagaggttgcagtgaaccaagactgcgtcactgcactccagcctgggcgacagagca[135 bp omitted]cccgtctccactaaaaataaaaaaaaaaaacctagccaggtgtggtggcgcacgcttgtaatcccagctactcgggaggctgaggcaggagaatcgcttgaacccaagaggtggaggttgcagtgagctgagattgtgccactgcactccagcctggacaatagagggagactccatctaaaataaatacataaatgaaaatgtgtagatatctacgagttcggtggggattcatacaacagtgcatctcattcccgaccgtgtcttatctttgatgacagggtcatcgttaatcctccatccagagaaatgggaagttagaggccaggacctcccagctgaagatttctgtgggacacagggctgggccagagaaaagggccctgcaggagacccttagaatagccgccgggcgactggccccacggtgccgggaaggaccctttgatctgattccgccatatgatccggttccgtgctggcccagcctggcctgggttggatgcctggtccgatgcccaaagccccatcaccctgaagcagatggagctggcatcctgaatgagactcctgggggctccagggctctcaggtgggagtcccagagccaccagggacctggagtgtagacctgggcagggagcttgctctctgccagctgcagtgggctcacctgtgagggaggatgttagaatagttcttttttaaaaaaaaaaattttttttttgagacaggatctggctctgttgccaggcaggaatgcagtggcgtgatcatggctcactgcaacctccacctcccgggctcaggtgatcctcccacctcagcctcccaagtagctgggaccacaggcgcccgccaccatgactggtgagtttttgttttttgttttgttttgttttgtttttgagacaagagtctcactctgttgcccaggctggagggcaatggcgcgatctcggctcactgcaacctccgcctcctaggttcaggcaattctcctgcttcagcctcccgagtagctgggattacaggcgccagccaccacgcccggataattttgtatttttagtagatactgggt[136 bp omitted]gtt[131 bp omitted]agggtcttgttctattgcccacactggagtgtagtgacataatcccagctcactgcagcctcaaactcccagcctctgttgatcctactgcctcagcctcccgagtagctgggactacaagcgtgggccactgctcctggtctattttcagttttttttttttgtttgtttttgagatggagtctcactctgtcgcccaggctggagtgcagaggcatgatctcagctcaccacaacctcctcttcccaggttcaagcaattctcctgcctcagccttccaagtagctgggactacaggcatgcaccactacgcctggctaatttttgtattttttaagtagagacaggctttcaccatgttgcccaggctggtctggaactcttggcctcaagggatccgcccacctcggcctcccaaagtgatgggattacaggcatgagctgccatgcctggccctattttcactttttgactcttgtgaataacgctgttttgaaaattcatgcgtgtttgtgtgaacaggtttctagttctctcgggcatatatcttggggtggaattgccagtacatatagcaactctatgtttaaacttttgactcttttccaaaggggttgccccgcttatgagaattctggtttctccacatcctcaccaatacttgttatggtccatctttttttgttatttatatattttatctatttttatttttttgagacggagtcttgctctgtcgccaggttggagtgcagtggcgtgatctccgctcactgcaacctctgtctcccgggttcaagtgattctcctgcctcagcctcccgagtacctgggattagaagggtgcgccaccacgcccaactaatttttgtatttttagtagagacggg[145 bp omitted]gctatgttgcccaggctggcctcaaactcctaggctcaagagatcctcccaaagttctgggattacaggtgtgagccactgtgcataaccctgaagtggttaattttaataatacatttactttagcctaacatatccaaaattacatcatttcaacatgcaatcattattaaaattattaatgagatattttattttatttttatttatttatttttttgagacggagtctcgctctgtctcccaggctggagtgcggtggcgcgatcttggttcactgcaagctccgcctcctgggttcacgcctttctcctgtctcagcctcccgagtagctgggattacaggtgcccgccaccacgcccagctaatttttgtatttttagtagagaccaggtttcaccacgttggccaggatggtctcgaactcctgacctcgtgatcagcccaccttggcctcctaaagtgctgggattacaggcgtgagccactgtgtctggccagtgagatattttatttgtgccctttttttttttttttgagaccgagtctcactgtgttgcccaggctgcagtgcagtggcacaatcttggctcactgcaacctctgcctcccaggttcaagcgattctcttacctcagcctcctgagtagctgggattacaggcgggcgccacgacacctggctagtttttgtatttttagtagagacgggggttttaccatgttgcccaggctggtcttgaactcttgacctcaggtgatcacctgccttggccccccaaagtgctgggattacaggcaaaagccgccataccaggcccatttttttttctttcgagacggagtctcattgttgcccaaggtggagtgcaatggcaagatctcagctccctgcaacctctgcctcctgggttcaagcgatcctcctgcctcagcctcccaagtagctgagattacgggcgcccgccaccacgcctggctaatttttgtatttttagtagagacagggtt[134 bp omitted]aattcagtgtgtagggcaggcatggtgcctcatgcctgtaatcccagaactttgggaggccgaggcaggtggatcacctgaggttaggagttcgggaccagcctgaacaatatggtgaaaccctgtctctattgaaaatccaaaaattatccagccatggtggtgtatgcctgtagtcccagctactccagaggctgagacaggagaattgcttgaatctgggaagcagaggttgcagtgaaccaagatcatgccattgcactccagcccgggcaacagagcgagactccgtctcaaaaaaaaaaaaagagagtcagtgtggagggaagtgtctctgttgggtccgggtgctctgtgggactctgaggaaaagctcgcaccaggtagatgctgttctgtccccatgggtaaaggacaccccaacaaaccgaggagcaaaatgtcctcgtatgccctcttcgcgcagacctgccaggaagagcacaagaagaaacacccggactcttctgtcaatttcgtggaattctccaagaagtgtttggagagatggaagaccacgtctgcaaaggagaagtgaagtttgaagagaaggcaaaaagtgacaaagctcgctgtgacagggagattaaaaattacattcctccgaaatgtaagaaagggtaagaaaggaaagaaaaaggatcgcaatgctcctagaaggccaccatctgccttcttcctgttttgctctgaacatcgcccaaagatcaaaagtggacacccaggcctatttgtcgtggaaactgcaaagaaactgggtgaaatgtggtctgggcagtcagccaaagataaacaaccatatgagcagaaagcagttaagctacaggagagatatgaaaagggtattgctgcatatcgtgctaagggcaaaagtgaagcaggaaagaagggctcaaagaagaacaaaccagaagatgaggaggaggaggaggagaaagaagatgaagatgaggaggaagagggtgaagatgaagaataaatggctatcctttaatgatgcctgtgcagtgggcttgttttgctaagaatgtgaattctagtacagctcagtattagcttcagtataaaactgtacaaattttcgtatagctcataagattctctgtacagaaaatacttttcttttcttttcttttttttgagacagagtttcgctcttgttgcctaggctggagtgcaatggcgtgatctcggctcaccgcaacctccgcctcccgggtcctggttcaagcagttctcctgcctcagcctcctgagtagctgggattacaggcacatgccaccacgctcagctaatttttgtatttttagtagagatggggtttcaccatgttggccaggctgctttcaaactcctgacctcgtgatccgcctgcttcggcctcccaaaatactgggattacaggtgtgagccaccgcaccctgcctaatgtccctaaatatttaatggtttttaaaaaatttattgtgtatggcagcacagcacacttgtaggaattagtatcaacagtacatcttgcgttttttaagatgctgcattttttaacattttgtaataaaattatgcgtatcaaaaaaacaaagaaattccgtgtgtagttcacactcacagcacatctccgtccaggcacttgagagaatgactaggaggggttcttggaggaggtggtctttgaacggagaatccatcttcaaggattctgtctgtaatggtcaccaagtatttcctgagtcacttccatgtgtcctgcagttctctgaaggggcgtgggacctaccgatgccaattatccagcattatctccagattccaagaagttggggtgtgagccagcaatcagtacagaaaagagataccaaaataagtttgagttggggagtgttccttcaacttcagttttctggaagagatcttttttttttttttgagacagagtttcgctcttattgcccaagctggagtgcagtggcacgatctcggctcaccgcaacctcctcctcccgggttcaagcgattctcctccctcagccttctgagtagctgggattacagacatgcacctgtaatttctactaaaaatacaaaaattagccgggcgtggtggcgcacgcctgtaatctcagctactggggaggctgaggcaggagaatcgcttgaaaccaggaggcggagattgtaccaagatagtttgttccagctaaacaacctggcgctagtgcaggaaaaggtggaaggcacggggctagcacaggagggttcaatattttcaaccttatcaagccatattttggcaactcttgtttttcacgagaagcccccgctgggcttgtcccagcgctgtcctgaggcttcccccatgagttccgatagggcagaggccgccctgagcgtttctctttcccctggtccaagagtggctcaaaagaaggatttttgactggaattggccactttgtgttactttttgacccttgacctcgccccaaagggggatgcgggggaggggctctggtaggggtggccccgctccttccaggtccgcaagcccaggttcccgcccaccgggctcagcccaccctgcggccgttcagggaggccgttggcacccgtgacctacgacccccttcccgagccccaccgaggtcacagccgtggcctcgtctccccatgcctgcttcccgccccctgcccgtgacgggcgtctccgaggaccaatgagcgcgctgtatccacccctcgggcggggccaagcgccgaccaatcgccgctcgggcgcccggccgggtccaaacgctccaatcgtcagcggcggcggggcgggcagagggccggggatggcaggttcaaccaacgggtgggcacgtcgtcctcgcgaggaggcgtgccctgcggccgggcgtgcggtgtccgcggcggcgcagggagggggagggaggtaaacaagatggcggcggcgtgtcgggcgcggaagggggaggcggcccggggcgcccgcgagtgaggcgcggggcggcgaagggagcgcgggtggcggcacttgctgccgcggccttggatgggctgggcccccctcgccgctccgcctcctccacacgcgcggcggccgcggcgagggggacgcgccgcccggggcccggcaccttcgggaaccccccggcccggagcctgcggcctgcgccgcctcggccgccgggagccccgtggagcccccgccgccgcgccgccccgcggaccggacgctgagggcactcggggcggggcgcgcgctcgggcagacgtttgcggggaggggggcgcctgccgggccccggcgaccaccttgggggtcgcgggccggctcggggggcgcccagtgcgggccctcgcgggcgccgggcagcgaccagccctgagcggagctgttggccgcggcgggaggcctcccggacgcccccagccccccgaacgctcgcccgggccggcgggagtcggcgccccccgggaggtccgctcggtcgtccgcggcggagcgtttgctcctgggacaggcggtgggaccggggcgtcgccggagacgcccccagcgaagttgggctctccaggtgtgggggtcccggggggtagcgacgtcgcggacccggcctgtgggatgggcggcccggagaagactgcgctcggccgtgttcatacttgtccgtgggcctgaggtccccggaggatgacctagcactgaaaagccccggccggcctccccagggtccccgaggacgaagttgaccctgaccgggccgtctcccagttctgaggcccgggtcccactggaactcgcgtctgagccgccgtcccggacccccggtgcccgccggtccgcagaccctgcaccgggcttggactcgcagccgggactgacgtgtagaacaatcgtttctgttggaagaagggtttttcccttccttttggggtttttgttgccttttttttttcttttttctttgtaaaattttggagaagggaagtcggaacacaaggaaggaccgctcacccgcggactcagggctggcggcgggactccaggaccctgggtccagcatggaggtggtggacccgcagcagctgggcatgttcacggagggcgagctgatgtcggtgggtatggacacgttcatccaccgcatcgactccaccgaggtcatctaccagccgcgccgcaagcgggccaagctcatcggcaagtacctgatgggggacctgctgggggaaggctcttacggcaaggtgaaggaggtgctggactcggagacgctgtgcaggagggccgtcaagatcctcaagaagaagaagttgcgaaggatccccaacggggaggccaacgtgaagaagtaagtatggcttgctggggtcggggccgggccgggccagtcacggtgctgatggttctgtcttccttccttctctcctccctccctcccttacttcctcttaacaccctgagctggacccgtctggcgcctgtgtcctccgtgccagggagagcgtggttgggggcctgcgttacggactttcactcaggcaaggccagttgtcgcagcggggcgtgcgtttgcatgggctcttggactccagttaaaatgccctggtagcgaaaccctcctgagaagggagcggcccccaatcccctaagactagccccttggctcccccagctgtccaaggagcagaggcgcccagtggaatcagcctgtgtttgtttgggccccgagagtttgtgtgcggccgccaacacgttttctgcgcagtgtgtggccgttaccggggccaggcgaaatgtgatttgtttatcctgtcagaggggaaccctgggctgccaaaaataactgtttgcaccggcttatcagtcagcaggagggaaacgtagcctttcctcatttgccagggatgtgacgctggaagcatccctggcccccggggctggaagccctgcccgagggggactgtgcctccctcccgaattgcatccggaagaccttacttttccaactgacttcttcaggcacggggctgccgctgggcatcccggacgcctctgcatctgtgcgcggagaagctcctacctagggcagcactggccggcctgagcctctcccagctggtgggggtggccgggggtgtccctgccttatcgcagccagacacgctgcacctgccgccgcctggcgggccctgcccaggccctgctcctttcccagccttcttaactttcaaaactttgcctcctgtttccaagaaaggaccttatctgctgggctaggcctcgagggactggcaaggacaccctgcgcagggcaccatgaccttggaaggaggtccggggaggggctgctgcggtgtctgctctcaccttcctcctgctcaggggccctggggctcctgccgtgtctgctctcacctctctcctgctcaggggccctggggctcacgtacatttttttttttttttttttgagacggagtctcgctctgttccccaggctggagtgcagtggcgcgaactgggctcactgcaagctccgcctcccgggttcatgccattctcctgcctcagcctcccgagtagctgggactacaggcacccgccaccacgcccggccaattttttgtatttttcagtagagacggggtttcaccgtgttagccaggatggtctcaatctcctgacctcgtgatccgcccgcctcggcctcccaaagtgctggtactacaggcgtgagtcaacgcgtgcggcctttttttttttttttttttttttttttgagacggagtttcactcttgttgctcaggctggagtgcagtggagtggtcttggctcactgcaatctccgccccctgggttcaagtgattctcgtgcctcagcctcccgagtagctgggattacaggtgcctgccacagtgcccagctaattttttttttttttttttagtagagacggggtttcaccatcttggccaggttggtcttgaacttctgacctcgtgatccacctgcctcagcctcccaaagtgctgggattaaaggcgtgagccaccgcgcccggccagcacgcttcttaatcagcatgcaggctgtgacatgcggaaaccaggggcacaggctctgaagtttgtactctggagctggagcagtcagggttaaatgggagcggctgggaagggtgtgtttccacgaggcctttctgatgtctcagtgcccagtctggacccgggtagaaggtgtggccagtgccttgagtcagtggagcagttgcctgtgcctggtctctgtgagatgggttggtcaggggctaggcagagcctgtgcctggtctctgtgagatgggttggtcaggggctaggcagagcctgtgctgggggtagcaggtgccctctaaaggggcc[139 bp omitted]catggtgaaaccccatctctactaaaaatacaaaagttagccgagtgtggtggcgtgtgcctgtaatcccagctactcgggaggctgaggcagaacattgctggagcctgggaggcggagcttgcggtgacccgagatcgcaccattgcgctccagcctgggcgacacagcgagactctgtctcaaaaataaataaataaataaataaataaataaataaataaataaatctggcttgagttttgacaaatgtatatgcagggtcaatgggaagacagacgctggagggtggaagcctgactgtgagagtgagccccctgctttcctgaacagtcagtggaggaggtcctgggagctcaggtgagcacctgaacggtagggcagagcctgagggtcttggtggagacaggcaagaaggttgcaggaacctagtctggcccagtgcctgggagaacgggagggaacacggaggcagggaggcagaggggttggcaggacctggactggactgtgcgtcgcagctacccacagcttgaccccactgccttgaagtgagtgatgcaccctcactagtgttcagcgtccaatttcatcctggccctgagtgtgtaacggctttgcccttgcggggccccctgggatgaggggtgagccctgtcccttcctggtcactgtctgccatcaggagctgccccgcttacagctgtgattcaggagccactgcatttcctccagccccctgggtgctgccagggggtcctcctattctgggagctggtgtgttctgactggaggctgccatgtgcagagtgctgtcaaggagaaggggtgtccactgcccagccctgaggcccaaggccttggccagccttgctgccagcgctgcagggaaaaagcctcctttgtgtgtgggaagtttaataaactccgctcagattgtgtctcgcagcgagtgtctggaaccttccagacaagcctcaggcgtccggtcctccagttggtgtggaaagcgtgggcgatcaccaaggggggtgggttggggcagatggagccggcgtgagtcccgtctcttcccttccttcccagaaaggcagccctggagtccatgccttgtcccgctctcaccggcaaaaagtataatcttattagaaataggaaagttccaaaaagcatcaatgagttaaaaagagggctgggcatgttcggtcatgcctgtaatcccagcactttgggaggccaaggcgggtggatcacccgaggttgggagttagcctgaccaacatggtgaaaccctgtctctactaaaaatacaaaattagctgagtgtggtggcgcacgcctgtaatcccagctactctggaggctgaggcaggagaatcacttgaacccgggaagcagaggttgcggtgagccaagaccatgccattgcactccagcctgggt[145 bp omitted]ccctctctctactaaaaatagaaaaactagccaggtgtggtggcacatgccaataatcccagctacttcatctgaggtcaggagttcaagaccagcctggccaatatggcgaaactccgtctctactacaaatacaaaaattagccaggcgtggtggcgcgcgcctgtagtccagctactggggaagctgaagcaaggagaatcgcttgaacctgggaggcggaggttgcggtgagccgagatcgcatcattgcattccaggctgggcaagcctaggagagaagagcgaaattgtgtctcaaaaaaacaattaattaaaataaaatcagtgccataggctgtttctggtaggcagtgggttcctagggtggagcagggaagggctggaaagggtcgcctgtgcccagcccgactccccgtgcttctcgggggacagcacggctagctgctgctgcggagcccacagtggggttctgggggggggggtgcaggcagaaggccgccatgcctccctccccctttccaccccagtgagagtgggctcgaaggcagggagtctgcccgccttgtggagcctccgcagaggcacccagggctgccgtgagcgcacagcctggcggtgtcccacggccctgccctttcctgtcacttccacctgttgcaaaacactgtgctttcgtatcttttctttctacctgtttggaaatgtgaaaatcactgctgccgtaggaaacgggcccagatccgggctgtggctctcccatccgcaccgcccccgcggtgtccagccaggaggtgggaggtgggcggcactcagtgtgcctggttgcggcgatgattggcagatgcttggacctatggtaaagaggattttcgcgagctgggagtcagtcctggactttgtaggtctttacatcccaggcggcctttatggggttccagcatctgctgaggcccctgcgccagccatgtgaggcctgggtgtcctcgaggcctctgtttgtgcccctctctgggcagcgggagggagagctctgagacccagagggagctcaggggctgggcagccgcagaacagcgggggtaatgggtccactgggggttctgggctgtgcacacagtgggcttccggtgcccagccagctggggcaggcctggaatgttggttcctctctcaggatctggggcgctgctgtagctgtcggggaatcagtgaggcggctggacggcccgtatatcccacaaacgccaccgtattgctcaaactggactcaattttcttaacacctttttttttttttttttttttttttttggagacagggtctcactgtatcgccgaggctggagtgcagtggcgcaatcatagctctgggctcaggtgaccctcctgcccccaaggtagctgggactgcagatgtgcaccaccacacccgactagttttttgtagagatggggtttcgccatgttgtccaggctggtctcaaactcctagactcaagctatccgcctgcctgggcctcccagagtgctgggattacaggtatgagccactgcttcgccacgttcacctttatttacttatttatttatttttgagacggagtctcgctctgtcccccaggctggagtgctgtggcacgatcttggctcactgcaagctccgcttcagcctc[133 bp omitted]ggcctcccaaagtcctgggattacaggcttgagtcactgtgcccggcccacctttttattttttattttatagagacaagggcttgctgtgttgcccaggctggtcttgaacccctgaccttaagtaatcctctctggcctcccaaagtgctgggattacaggtgtaagccatagtactgggcctaaagttcaccttttttttttttttttttttttttg[132 bp omitted]cacc[137 bp omitted]acccggcaaagttcacctttttaaagtgtgtaattcagtggcatatagtacattgacagagttgcacaactatcacctctatcagcttccagaacattcttgttaccccagaaggaaaccccgtctctgtcagccatcactccccattccctccccagtcccggcacccacgcattcccttcctgcctctggattggcctgtcctgaacatttcacacgagtggtgtcacacaccgcgtggccttttgcgtccggcttgtctcacggagtgtgctgtcctcaaggggcatccgcgccgtggcctgggtccgaacctctctgctgttcacggctgcgtcactttccagtgtgtggagggccacgctgcgtttgactgctcatctgtggctggacacttgggctgctcccgcctctgcctgtgaattgtggctgctttggtgcacgtgtgctcagccggcgtccctctagaatccttgagggccttgtttcagccacatcaggagggattcagggaccagggcacgcgggtctggagctgggtgttcctgggtctccatgtgcctcccagtcctgctctgagccgtgggaggccggggcgagggccaggcccatctcttccctgtatgatctgtttctaggcagacggaggctcctagccccacctctctgtgagcttgagtggcgtttatgactctccttcctatttcctgtcctgctaatcaacaagtcagctaaacagtccatgctgcctgggcaagcccagtaggcccctaacgtggcacctcggagcggctggcgatgccccaagagccgggcttccccctcctggaggctcttcctgttcctcgccaagctcttaggtttcgctgggcctcctcttctgctctttttctggctggagacgtcagaggaagcctggcgatctagagaagctgatgtgcacccatcatcccggaggtgactgccaccaggcgggggtggctccacccccactcctcccctggcataaatcgggggacgcacgtgcctgcgcagaatgccttggtcccttttaattaaacagacaacccagtgtcccttggtctatgctgacctgctcaggagtgcctgggctcttccacgtttcagctgctgtgtgtcctgctgctgtgaagtgtccccgttgaggtggaggcagggcagggcgccttcggtgagggcgagtcctcctgtgcccgtttccccatctgtagaatgatggctcatggaggagacatggtgtcggcaggtggtggccggcgcagggaggtttccaggagggagtcctccaccctcatttgcttttagggccgtgcagcctcccgagcggcccccacgaggctctgaggctgcatgcaggttgagctcctggcctcactgcccctcctcagggttaggactgtgctggagcctgggtgggtgtggggtggtccctgcacaggcagcaggaggtgggccagagcggtgctggacctgaaggcccgtggctccctcagctccactgaggaggctggaatagtgtcctgggccaccttccctgccggtagccggctcctgctgagggagggggtgctttcgcctcctggtggagcatcaggctcttggggcctgtgcgtccgagcatctggcctctgctgtctgaaaacagcaccttccccgccccccggccaccgcatctcctctgaatagaaggcaagtcttgcctcccaggaatggcctgtgaccttcatcagcgggggaggttaggggcacacagagccctggggaacaaggggatctggggctgagccgggcctctcgggcccaccccgagctctcctgagcagcctggcaggcaggaaggcgctgggccccggggcctttgccgagcccagcctcaccctcagcgtccccctcaatgccctgggtgcctgccaggctgtggacacaggccctggccagttctataaataaccttgccgggccctgctgggaattggtgccaccaccacatagcccagagagaacggaaacacagggcttctcagcgagcagaccaggcctgcggtgaccagtggaagtgggggacgctttcagggctgggcagcccgacagggcaccgggcacagccaggggccggaaccagttgctcactggctccgcttctgggggactgtgtccctctgtgccccgtccccatcacaccttgctttcccttcatcctgctctcctagcccctccccagactggcggccccttgtccaggcccagccccagcacagcctgcagccctggcagagctcaggccttggccttctgaggttgccctgagggcagtgagcaatgagccctgggactggtgcactgggagggaaaggtgagccaaggcttcctgcaagaggcagccctgagctgggggtggggaaggctgggtcgtgggatacccctgacaccccaagttttttttttgagatggagtcttgctctgtcacccaggctggagtgcagtggtgagatctcgactctctgcaacctccgcctcccaggttcaagcgattctcctgcctcagcctcctgagtagctgggattacaggcgcccatcaccacgcccggctaatttttgtatttttagtagagacaaggtttcaccatgttggccaggctggtttcgaactcctgacctcaggtgatccacctcggcctcccatagtgtcgggattacaggcgtgagtcaccgcgcctggccccccagctgttttttatgctccatgcttgggcttcctgttaagaattaaaaaagaaaaaaaaaactatggagatggaatttacatactgtacaactcattcgttcacagtgtacaattcagtggcattaagtacattcacacggctgtgcaaccactacttctaattccagaacgttcggtcaccccaaaagcaagccccattcccattgtgtcactctccatcccctccaccagctcctggccactctgaatccacttcctggctctggattggcttgtcctggatattgcatagaaatgggatcctgtcggccgggcgcggtgactcacgagagcaagagatccagaccatcctggccaacatggtgaaaccccatctctactaaaaatacaaaaattagctgggcgtggttgcgggcacctgtagtcccagcgactcaggggctgagtcaggagaaatcgcttgaacccgggaggcagaggttgcagtgagctgagatcatgccattgcactctggcctggcgacagagtgagactccgtctccaaaaaaaaaaaaacaagaaatgggatcctgtcatcccagcgttttccgaggccgaggtgggcagatgacttgagcctagtagttcaaacgagaccagcctgggcagcacggtgaaactgtctctactaaaatacaaaaattagctgggcatggtagcacacgtctgtagtcccagctacttgcggggctgagatgggaggatcgcttgagcctgggaggtgcactccagcctgggcgacagggaaaccctgtctcaaaaaaaaaaaaaaaagtgcatcacacactgtgtgtcctttagtgtctcactgtgacatcctcaaggtgcagctaggctgtggctcgagtcagagcctcactggtttttgtggctgagtcttgttgagtgcgtggatgggctgtgctgatcctcgtctgtggaagggcccctgggtggttccacatctcggctgctgtgcgtcctgctgctgtgagcatctcgtgctccgtttctgcgtggcgtgtactgttcctcagggtgtgtacctgggagtggagctgctggctcacagggtaacagacctttggagaagctgcagacgcttccacgcccacccactgggtgtgaggaccttgctcctcgtcatttttgtttttgtttaattttttcttttatgagacagggtcttattctgttgtccaggctggagtgcagtagcacgatcacaggtaactacaggctcaagtgatcctcccacctgagcctcccgagtagctaggacttgaggcacgtacctccacacctggctaatttttgtatttttagtagagacagggtttcgccgtgttgctcaggctggtctcgaactcctgagctcaggtgatccacccgcctcggcctcctatagtgctgggagaaatgaagtgtctgcgacagggcggcagctgcagagggggctgtgctctctggcctgttgtgccccacccttgtgacaggcaggtgggcgtggccaactgggcggcagctgcagagggggcagtgacaggcgggtgggtgtggcaggaccccacaatgtctctttctgtggcgtctccttcttcgcctgccccttcctatgggccatccttccagctcacctgcggcccaccctccaaggagtgggaccctcggagttgggagcccttggctgcgtgggactgtactgtgtgacggagccatcaccagggctccaactcaccctggctcctgccacagtctgggctccatctgtgctaccattgcagtagtctggtttctaggaagcaaaactgttactgagttacaaagctcaattaagagtgtcctttgggaggccgaggcgggcggatcacaaggtcaggagatcgagaccatcctggccaacatggtgaaaccctgtctgtactaaaatacaaaaaaattagccggctgtggtgacacgtgcctgtagtcccagctactcgggaggctgaggcagggaaatcacttgaacctgggaggcagaggttgcagtgagctgagatcgggccaccgtgctccagcctagggacagagcaagactctgtctcagaaaaaaaaaaaagtgtcctaactgtgtcctccaaagccctcgccggccgatgacagactagagggcgctgtgctcccaccccctaccgccctgagcctggacgcgtggcccctgcagggccctttcccacagcactgtgaactcacagcttctctctagggaagggaggaggtacgccacttccacagggagatggggaggccgactccagggatccaggccatcatcctgacgttgggtcggctgatacacccctgtcctctctgtcccagggaaattcaactactgaggaggttacggcacaaaaatgtcatccagctggtggatgtgttatacaacgaagagaagcagaaaatatatcctttccggtgttgggaccgcggggcctccgtgggaggggctggggccctgggtccgcctgcctcgaggcctgctcctcttcccgtctccttgaaggagactggcacacgagggccgtggccttccctggttccccggaagtcagccattgtggcaatggctgcgcagcttgctgaaaggggccctgagccctggcccctgtgtcttgggcccgtggggtgtcaagtcccttttttctcagagtctcctcccaggctaaccaggggtgtagccacggtctgcctgagacaggccacgcgggctgaccgttgtgggccattttggtcgtggctgggcgtgtcctcgtgtcatctgtggacacccccatgggtcttacgggcacagcctccctacggggactttgcttcctaaggccctgtgcccagagcaagagccagaagtggtcctgaggctggggctgtgttccctgagccacgcggtcaggggccctgggaccgtcctgcatgggcccgagcctgcttgggggggcgtccaggaggcaccatcccccgcccatgggcagggtgggggacgtgagccccgcaggaacgctgccccaagagtcagccctgtcctccccttccccgtaggctccttcctcctgggacgctggggcccctgggccttttcagaggggtggctgagggcagggtgggccctggtcccgaggaggggcaaggtgggtgcagagggtccctccagagccccttttctggcccccgtgctccctgggcctgtgagtggggccgccccctgagctgtgtgtccttagcgccccacgtatatggtgatggagtactgcgtgtgtggcatgcaggaaatgctggacagcgtgccggagaagcgtttcccagtgtgccaggcccacgggtgcgtgcgcggggcaggggccagggtggggcgggggccgggggccaggcagggcaggctcctttccgtgaggccacactgcttgtcctgatattcattgacatgaaggcccaagtttttttgtttttttgtttttttgtgttttttttcgagatggagtctcactctgtcgcccaggctggagtgcaatggtgcgatctcggctcactgcaagctccgcctccgaggttcacgccattcttctgcctc[134 bp omitted]agcctcccaaagtgctgggattacaggcatgagctaccacgcccggccttgtaaaggcccaagtttttaaaaacagttttggggtcccccatgtgtggcatccacaggcagggctgctgccaacctcccgcctccatctttgctgggcctgctgcctgaggccagtggcctgcttccagcccatcgctggcagccgcctgccctgaccagatctcctggatgcaggtctgtggcctcagagtcagggccccttgctgctgcaggaccacaggggcagggaggggcctgctgttccagcaagactttggggtgcagccggcctgtggcccacaggaaaatgagacctgtggacatccggggccctgccagacgtggctcggccggacgagggtggccactgcaggcgcaggtgtggctccctgctggacctagcctttcctctgtcctgtgtgcctggacttctgtgacttcccagctgggcctgtggtgtttgggaggctcccaggcagctgcaaaggggacccctgtgaggggcagggaggcctcggccccaggacgggtgtgtgctgcccgcaggtacttctgtcagctgattgacggcctggagtacctgcatagccagggcattgtgcacaaggacatcaagccggggaacctgctgctcaccaccggtggcaccctcaaaatctccgacctgggcgtggccgaggtaggcacgtgctagggggggccctggggcgccccctcccgggcactccctgagggctgcacggcaccgccacaggcactgcacccgttcgcggcggacgacacctgccggaccagccagggctccccggctttccagccgcccgagattgccaacggcctggacaccttctccggcttcaaggtggacatctggtcggctggggtcaccctgtaagtgccccgcccccccgggcactcaccacacgcacactccgaggggcctctgcgtcttgggcagctgccggcctgtgggcgcagggcgtggccaccggcccagaccctctctggccacagccgctagggggtgcttactttatggaaatgtaactcatacggcagatggtggttcacccgtgtgaagtgcagcctggcccgtcagggatcttcacagagtggcacggccgaccctcctcccagagccccacagggaagctgggcgggtgacagcagctccaggccccttccccgggtgggtccagaggacactcccctcctaccccgtagcctccactagtggaaggtggtgaagacagaggtgtccttgagtccacagggcctctggtccagcagccacgggacgcctctgtccctggggtagagctggggctcctagggcgtcaaccaccttgactgaccacgcctttcttccctcccctcgaaatgaagctacaacatcaccacgggtctgtaccccttcgaaggggacaacatctacaagttgtttgagaacatcgggaaggggagctacgccatcccgggcgactgtggccccccgctctctgacctgctgaaaggtgggagcctcatccctctgcccgcagccccagggaggcggggcttttgtgcagaaatgtagggttgggggtgtcaggtggggggctattggccccgagaccccagcaggcattgagaggactgagtggagaggccgacctccccgcagggcctggtttgccaggtccctcagctccaccctgcttctgggccctgttcaccctccgaactcccaccccagagggcagtgctgccctgcgcctcccccagccccaccctcgggggctccctggcttgcagggtctgtcagggttgtcctgctgcacttcctacgcatggcagcaggtggcactggccgtccgtccatctgcccagtggccttgggagaacggaaccgccctggccgtccagcccagccctgtctccctgccagccgcgcacaggctgtccccggcatgtcccaggagtggagtggcctctgtcagggagaccgcctgtgcgcggggtcccccttaggagcgtccaggtatcacccagggcctgacaacagaggctgggcaggcggggacggttggtggggtctcaggcctgtgcccagctgacaggctcctcgccggcttctcctcagggatgcttgagtacgaaccggccaagaggttctccatccggcagatccggcagcacaggtgagcggcccctgggggcagtggggccgaggctgcagggaggccggccatgtgggcagctggttgagcgggcgctagagcagggcgtggtgggggtgccaggctgggctggggccagaccccgtgcagcgcccgcagttctcggggcccgagtggggtctctgggcagtgtcctgttaccggccagacccaggcgccttgtccgaactggggtctgagtgaggacatgcgtccgtccctgccctaggcatggagatgcgccaggaagggcacagctggtcccaaacactggcgagagcctctctttttcccctcctcctggggctcccagcagcagggtgtggctgggatccagcccagggcccccagctccatgacagggaagacagagcagcggacggggtcagcaggccccacagtgccgcctccctcacttcgtgggctctgctcctctgcaccagcccctggaggcccttgagccgtctgctggagcccctccgagccccgaggccacccactgagaccggctctgggagtgggagtgtccggacccctgaggcgctggtgctgattgtgccttgggggtctctgcacagctcgggtcatctgggcgcctggcggggactggggctgccccccgatagcctcctgggctgggatgtgctcagggccccccagacccccttctggcctttgctggctttgcagccagcatccatctggtgggtgctggcttctgagtgccacctgggacacaggcctcagggtggaggggacatctgtcaggcttggagtcaggtcagcctgcctgctcctagaggacatggctgagcttctgtggtcacagccaccccttgcacggcctggtcccagctcctgagtgtgtggcaggtaccctgggcccagaggagctgggtcggaaaactggaccgccctggtgccagcctgacaggcgccactgcttctgggcgtttgcagctggttccggaagaaacatcctccggctgaagcaccagtgcccatcccaccgagcccagacaccaaggaccggtggcgcagcatgactgtggtgccgtacttggaggacctgcacggcgcggacgaggacgaggacctcttcgacatcgaggatgacatcatctacactcaggacttcacggtgcccggtgagtctggcgggggcccctgcccggctctgctgactcggccaggatgtcccacgggagcagggtgcctgcctgtctgcaacaaggacagcttctgccctctggtggccaatcccacgtccccaaagcctccagcccacctgcaggctgcctccgccctgcgggccgctgggacatggctgaaaggtgtggggtcagcgggggcaccagcccaggcctgtctggccaggagggttcctcaggcgtctctccgggtgctgcccagccaggcaccacccaccggccttggcctgagtcccagcaggagcaggcgggggagccccagggtcgggggagggtaggtgagagtcagggtgcagggtggcccctcagacagctggcatgagagagggtccagtggccctccctcccgtcgtccctgaggcctgcccgctggccctgatgccggccgcccttcttccctaggtggcgaggaggcgtctgaggcagggcttagagcggagcgcggcttgcagaagagcgagggctcagacctttcaggagaggaagcctctcggccggcgccgcagtagtgcctgaggaggagctcagggccttagcgtaggggcggcccacattggcagccagcccctccccgccatgctcccggcttggctgtgttcggcccagggctgggccgtgtcataaagagttttgcagtgtatctgcagggtggatgcttgctgcgctcgggctggagcctgagggggctttctgctttactgtttcagcgggaagtggtgggcaggggccggcctgagaaggggggtacgccaggcaggttgggatgtgaggacccagtgcacagggtccacccccgggcccgagggtcccagaatagtgggggccctgcagagagccccccattaggtccctcagcactcctgggcccctcatcaaacccctaggctcagctcagtagctggtccccaggagagtacagtgtgggggcccccgagagcacagtgtatgggggtccccggggggtacagtgtctgggggccccccaggaggatgcagcatgtgggggccccccaggagggtacagcgtgtgtggggcccccaggatcacagggtctcagctcctgggctcttggatttgcagcaccacgaccatcgcgtctggtctgttggaacgggaggtgctgctgggtaccctggtcactagggtgtgctgggaggtgggggcccctcatggtgcccatccttggggcctggctgcaatttgaccccaggcccagggtcttctgcctttcagagccctggtgccctgagacgggcagccaggcaaatcccaggcaggagggccagttagggcagggccagcccaggcaggttgcgagagtccctactgggacgtggaccacacgctgacccccacggccgcccctgcaggccaggatccctgagccaggacccggcactggcttccctcctggggaccctcaggcctgtgtgagacctgggctgccctggggtgaggtgcctgggaggagagcaggggctgggccacctttttcatgaccctgctaagcccactgtgggtggtgaggaggagtacccagcagggggaagggccgccagaccactcggcatggctgaggcctcagtactcagtactgggtactcaggtggacgcccctcccactgctcagatgctggggacaggctcaacttcaggcttcagcgtgagccccgtccctgacctgcagagcccccttgcgttggggcaggacagcccggcgccctcgggtcaggccatcctctgcgctctgccggggctgctgcatcggcctctgcgtgcctccactttggcctcacgtgtccctacccaggatgcgggtcctgctgccaacacccagatcccagggaaggggcttgggctagatcctgggcaccagtgcagacaggagtgtggggtggggcaagggcccagtggcggctgtgcccgctgatgcagagctggggcaccttgtccacagggtctgccccaccagagacgggctgggcccaagctcagacctatgggtgcaattggtgcctcctcaccaaggtcttttttatctttttttttttttggagacagagtcttgctctgtcgcccaggctggagtgctgtggtgcgatctcggctcactgcaacctccacctcccggattcaagcaattctgcctcagcctcctgagtagctgggattacaagtgcgcgccagcatgcccggctaatttttgtatgtttagtagagacgggggtttcaccatgttggtcaggctggtctcaaactcctaacctcatgatctgcccacctcggcctcccaaagtgctgggattacaagcgtgagccaccgcgaccggcccaaggtgcttttttaaagctagtgacttcctgtgcacatggggtgggtgtgtggcaagttctggaagctgctgagtcagccactggtccattctcggagctggggctctgcactgggcacatgagctctggggcagcccggggcggcctcccactgacttcgcccgggaggggcctcggggatggctcggcagccagtgtgttcgcggagtcctcgccaaccaccacggctcctcgcagggacagtacgtgggcagcttcctgcactttcccctgccattgtgagaacagtgtccacctgggcagggtgggcagccccaggcctgtgggtttcaccagggtgctggtgatggttggtggctagcagggactgggggcagctgggggccctggcaggctgagctctgctccccgcgtggttctgtgctggcatttcgcgtgcctggcctgagcctggcccgagcctggccctcctgtgtcctcacagatgagcatgtggcggctcctgggcctctagaaccaaccatgggccagggtgccccaggggagcacgggagggtcctgccttgtcagcttgcctcctactcgtgaggttcctgcagtcagtacctgggtggggtcccacctgcggccatggcaggtgcaacagacgtggtggaggggacactcctgcccaggccatctgcgggaggctcagccccggggggtgcctcccagagctgctggggggcagcatttcaggctggatacacctgggcctgacccgggggcgggcatggcctgggcagcagctgtaagtgcgtccccgtggtgggggccagccaggtccctgtggctctggggttgcgcccctcagctcaggccacacttgccgtctccctcccaggacaggtcccagaagaggaggccagtcacaatggacagcgccggggcctccccaaggccgtgtgtatgaacggcacagaggcggcgcagctgagcaccaaatccagggcggagggccgggcccccaaccctgcccgcaaggcctgctccgccagcagcaagatccgccggctgtcggcctgcaagcagcagtgaggctggccgcctgcaggtggggcgcggcggggcccgggtggggcatgtggggacaacgcctggatgccacagccagccgtgagcatagcccgcgctagtcagtcatggtgaccgtcacgtggctgcgcgtggttgccatgtggcctttgggtggcttggccacgtagcgatccccgtggagggtgccgtctcggggcctggtgtctggccagcgtgctggtcatggaggcctacgtgtggcggggctctgggggggcgtgccgtcctcacagccacctctcagagtgggtgcattccgaggaccctgccctgggcctggcgccccctccccatgcccgcgccgcttccaggaaaggcttatgctgggctcagcccagaggcttttgagcaccagtgggtggtgggtggtggggaggggccgcggcctccatggctctgccggggtgccgcaggctctgagccagctgccaagtatggctgaggctgagtcgtgccggacgctgccctgtctctccctgtgtgcctgcctcctctcccagccccagccccagccccgggtgggagacggagtcccagaggtgtcagagacccttaagtcacctgccgaggatgcggggtggatgggggcccgaggctgaagcccctgccttgccacagcccctctcccaggttttgggggccaccgcctgagttacatgtctgtcccccaaatgggtgcccacagcccatccaccagcgtcagagcccgccaggccccactgcaaaaggccacacaatgtaccccgggagtgactcaagggtggccttccctggcctcccctgctgccccccaggagtccggtagccccatgactgtacctcagcttctccatcctcccaggggcccgcgggaggcggagaaccggtgcccaggctgacctcttccgtcttccttccaccctgcagcccgtgtccaggagccccgccaggtgcccgcgccaggccctcagtcttcctgccggttccgcccgccctcccggagaggtggccgccatgcttctgtgccgaccacgccccaggacctccggagcgccctgcagggccgggcagggggacagcagggaccgggcgcagccctcccccctcggccgcccggcagtgcacgcggcttgttgacttcgcagccccgggcggagccttcccgggcgggcgtgggaggagggaggcggcctccatgcactttatgtggagactactggccccgcccgtggcctcgtgctccgcagggcgcccagcgccgtccggcggccccgccgcagaccagctggcgggtgtggagaccaggctcctgaccccgccatgcatgcagcgccacctggaagccgcgcggccgctttggttttttgtttggttggttccattttctttttttctttttttttttaagaaaaaataaaaggtggatttgagctgtggctgtgaggggtgtttgggagctgctgggtggcaggggggctgtggggtcgggctcacgtcgcggccgcctttgcgctctcgggtcaccctgctttggcggcccggccggagggcaggaccctcacctctcccccaaggccactgcgctcttgggaccccagagaaaacccggagcaagcaggagtgtgcggtcaatatttatatcatccagaaaagaaaaacacgagaaacgccatcgcgggatggtgcagacgcggcggggactcggagggtgccgtgcgggcgaggccgcccaaatttggcaataaataaagcttgggaagcttggacctggccgtctgggttttgttcgcgtctcaacgtggatggggcggcagcggggcgggcgccgttgacatgcggagggcagtggggactcggggcgcgggagggccggggccggctccctcagggccggcggcagcagcggtggcggcgcggttattgctcggaggcggcgcgggctgccgccagcacacgccgcagtgaggtaaacggtctcggaggtcggcagtcacggtgttgagccgcctcccggcccagggcggcgaactcgtctgcgaccgttagcgccccgcggcccccgcccgggcgagctcgcgcacgcgcccggcacgcggcggctccatcgggcccagtgggctgcgcgaccctcgggtggcgggccctgcgactaagcggccgccccgtccgggactgagggcgagtgatcgttgtcctcaggagcccgaagctgagagccgttcacgccccttccttcccgcccagccggggtctccgcggcccgcgcctcacgacgcccagcacccggcaagcaccggaaagagcagtgcacacttcggcggcgcgagggcggccggggctctgcgcctgcgccctgaagcggcgagcgcgcctccgtcgcccggcgcgtgcgcgaagggcccgcggtccccgcgcattcgcgtcggggcgtcgcgcccccacgtctctcccgccgccgaggccccgtgcggcgccggagaagctgccagagagatgggcccaggacgcgggacttaggccgggctgtggtcgggggacgtgggggcggcggcgaccaacgcgggagtcgccacgacgggctcggcgaggcgcggcggaaagagtctctcgtcgaggccagccgccagcttgtccagcaccgacccggatggtaggacgcacaggcccgagccggggcaccccccgccgcccggctcctcctcgatgacggggatggcggggtcgtcgccggcgccgcccagggtgcgaccgtcgggcgggccgtccacgctgtcgccgcgccgcaagggcgcacgcgcgggtcgggccgcgccggcaggcggtgccggggttccggccagggccggggccgcgcgggcgccggggtcgctgtgctgccggccacgctgccactgtttgcgggcgtgcgggtgcgcgcgggcgcggtgtcgcgcggcagccggcgtgtcgtcgaagtgcgggtcgtggcgcaggaactcgtggaacagcgcgtccgtcttctcgtcgatgctgtagtcgcggcgcgggcggcggggccaggcgcgcgggctgcggggccgggcgggcgcggcaggtggctcggtgtcgtcgcctgcgccgcggccctcgatgctggcgtagccactgtccatctgcagcagccggcgcgcctcgccgtccttgggccgcggcgcgggcggggagggcggcgggaaggcgggcgccgcgcccccggagcctgagcccgagctgtcgccgctgcgcaccgagtcgcggtcgttgccgctgctgctgtggtccgaggcggccgcatgcagctcaagcgaggcgcgcaggctccacaggtcgcggtagctggtctgggcctgctcggggcccgcgtcccgctcggcgtccggctccagtggcggctgctgctgctcaggccccgcgctgcccgcgccgcgctccgggggggaatcggggctcgctcctcccgctgcctcggccgcctctagcctgcaagccaggccgcgccgtcagagccccgccgagccccgcgccccctacccggccggccatcccgcctctggatcagggagggtggacgcgggtgggacttgggactcgggcgggccttggaaggtgagagctttaaaatgagccagtgtgttttgcaggggatgcgtcttgcattgaccctgagctgtggcgcctgcttattaagcagggtgcctccatgctggactgcagacggcggggccccctcccttggaagcccccaggaaaagtcaacatgcttctctccgggagtcacgttttcccagcctcccagtggacgtgggagccgcaggggatggactggacgcggttgagtccagctcagcccctgctccaggctagggctctctgcccacccatgctggataaccagcaggaggacagtgcacagacgtgagggtcacccgccataccagggctgccccaggaaccctgctctgccccagccccacgccccattcccatcccaccgacgtgggccctgggcttcagggaagttgcccttgggttgggggaggggtgctgctggccggagtggtcacagcagcttctgagaggagtctgcccagccttgggagcatgggcggggcgggggtgggagagggcctgggaccacagcagaacccttcaggcctcggactccaccagcaagcagcagtaccagcgccatcctcggggggcccctcctccccacccaccgccctacccttacccagtctctccctgcttccctcctctggtccatgctggagaggtggccccagtgagtccgcctctgggaggggccttgccgctggaggcaggcgagcgcgtgtccacggggcctggagagcgctccctgggccgcctaggggggggcgaaggggggcaagggcccacaggtccacccctagcacctccatctactgaaaaatacctgccgagagcagggggcgggctggccagaaaggggcgggggtgcgggaaggccacggcgtcgcccgcccgggcaatgtactggatgaagtcctcctggggggcatccccctcctcctgctccgtgctctcactggctgcccgctgccgctggaagtggtgccgcttgggggaacctgcgcacgggatgtgccgtaagcgtcagccggcatgtgcctccacccgctccacacacacacagaatgcctatgcccccccgccacacacacacaatgcctgtgcccccccgccacacacaacgcctgtggacccccaccacacacacacaacgtgtgccccccacacatacaacgcctgggccccccccacacacagaacgcctgtggcccccatacacacacatagaacgcctgtgccccccaccacagaacgcctgtggccccctcacacacacacgcctgtgccccccccacagaacgcctgtgcaccccccatgcctgtgccccccccacagaatgcctgtaccctcctacacacagaacacctgtggcccccacacacacacaacgcgtgtgccctgtctctgtctcacacacacaggagtgggccctggcttgggccagaccctggctggcatctccccgggtcaggtgggtgcggacagtggctgtgtgtacaccctggagtacaggtgagaaaactgaggcacggagggaagaggtgctgggaccagagagcctgagcagggcagggccaggaagcgagtgagtggaagggcctctggcaccgatagtgccttgtggcagccctggtcaacatgtggccactcataagggcgtgtcctggacacctggtggcctgcacagcctggctgaaactacggaaggcatgagagagtcacatacaggctggtgggggccaacgaggagagggagagaggtgccctctcctgccagctccaccctggtctggagagcgctgggggactgccccacccctgcctcggcccccttctcccaacagcctccccagcaaagcttgagtgggcaggccccagcaaacaggttctgggatgtgctgcaaccacattggactctaaatgtctctagtcacccctgggccccattcatttcaagatctggattctctcagctggagcggggcagccagaggaggccttcccctccctggcccctagctaccttgggggtgggggctgggagaactcaccccacccccgctggctggagccacaacacagggtctcccactgtctgatgatgtgtcctctgtcatgctgacagcaccttctctctgcacttgtcccctatcctggcctcacctgacgacaggacctgccaccctgtccacaaggcagagcgggccccagcccctctgggctgccctggccctgctgagctggctgagcagggctggtgcctgctgccagtgctacagatgggacacctctgctccccacacaaactcctgcctcgagcccagataaggcagccctgtctccaggatcctgcctgacccaaggcctgcagaattgaagggctactgtcaaacagtccagggatctatgtgctacagcccagagggcaaaagcaccccctgccccggagcttcggtaagttttactggcacacagccacgtgcattcgtcatgcagcgcctctgactgcttcctcgcctcaacagcagcagagttgtggagacacagcctctctgaccataaccccacgaacaccaccatccggggcctgatgggaaaagtctgctgacccctggcccagtccaacacttacttcgtgttagaggaagtcagagcccagacaggcagagggcctcggccaaggtcacacagcagctgatggtctgccagcgggcgagggaggggccccgggggaacccgccttccactcacattcccagggatgagagccgagcatggctgggaggggatgcaggccacaggccccaccctctgcgctccacagtgaccaggtggcccccgacaccctcctttaccacctcatcctggatgccccaatggcccgagagcagtcggggcgcgcaaagccttcccgcacaggttcccggagctgggtgggtctggctcaggccgcccgcacactcagccctcccagccacctgcagaacctcaggcagcacgcccgctggcagactgggcaggactcagccccagagcaccggctccccacccagcccacaacctcctgctcctggatgtccagggcagcccctggcagccagcacccagcccacaggggcccactctccaccaggtgctacagctcacctctcgtgtccagactggctgcccgctggctgggctccagcttccacttcttgaccttgaaataggggctggccccatccaggctggcatggcggcgcaggcgggtgaggaactgcagaacggtacctgccccggatcccgggcccgcctccccaggccctgctgcagccccgggccctccagccttggtgctcctggtaccggcatccaactggcagggaacagagatggcgctcaggctaagacttcttcctgggcccgtgtgctggccccaggtggccgtaggtctgagagacagtcccaagggccccccatcactgggacagagaggggtacctgctcggagaggggcagaagcgggaggaggggcgctcagtggctgggtgggctacactaaggtgctctgccctctggggaaggtccctggatatggggtttggagagaaaaggaggtgcgtgtctagaaggtctctcgcccacggcgtgggctgcaggtgagggagggcaggggtggcgcaccctctccagaacctagggaatgtcaaatgaggtgggagcctggggtgccccctgcatgtgtgaggacacgcctgtgtccggtgtgcggccggctccctctttctcccgtgtgcaatgacccggcgggccaaggagggctgcggtggctggcaggtcataggttgaccttggtcctggactggggacagggaggggaaggagcctccccggctgtggacaccatgggggacacgcaggggccctcaccgaggtgccttccccagagtcgctagatgccgaggggctgatctctgcgaagtcagtggcgcccgcggctgagttgtaggggtcacctggcagggcggagctggggcccacagagcggccggtgagggccttccccgggggctgtgggacagagccaggtgggggaggaagcagtgacaggtcaaagagcatgggtgggtgagggacatgggcaggtgaggagcatgctgggcttggccccctgccctgctccaccccaccccgcccatcccgagatgagggccacccagaaaaagagtgggtgagggcgtgggggtccgggagtccccggggctgcctcccgtcccccgaggaaccggggctgctgcccataggctcacctggaagatggccagagtggccttgggagaggtggccgggtggggcgtggtggctgagctggcctcgcctgagtcacactcgtggatggtgacaatcttgaggggcggcaggtgcaggtgcgtgagccgggcattcttcaggtggtggaagtccccctccgtcagtgtgtacctgcgacagcatctggccatcagagcccgcccacctcccatgcccgatgccccagctgccgtgctctgccatccaccctgccggcctgggcaggggcaggcgaaaggggggcaactggccaaggccgccccaccccacggtcccagtccaggagcctctgccttggtccctgcagcctccgcacccagctcctcccccgtcccggcggccaggacctcagacaggccctggggtgcctcccaacgccgccccgcttaccggcgacccttgtcctgcgtcttgcggctctgctcaaacagcgccgcctcattgaaggagacccggcggcccgtggagctggtggacaggaagcgttcggtctccgcatcctggcactcggggtcctctccccggaagtcggggtctgcgtggagaggcaggagagggtgggccccgggcgggccacgccaggcgcctggtcccgggagggctgctcctccgggcggccacggcagggagggctggggccgcggcacgggcggccgggctggcggggcgagggacactcgtccatccgctcacacactcactcgctcagcacgcgcctgggcccacctacgcctgggcgttaaggaaacagagatgagtcggaatcgagctgcgcccagtctggtgggggagacagacagacacagacggtcaggcagcccgagggggcggcgggtggccgaggggcggatggacaggcgagcgcacagccaggctggccagcacctcaccttgggctgggtgggtgccgttgtccaggtaggtggtggtggtcttctccgcttcctccatggccctgggagagacgttgggagagcccagtggcacggagggcccagatagccacagtgggtctcggctctttgccccaagccaagccctgcgcatcacccagtctccagaggcatagcccaccctgtgactcagaagccagtgaggtagaccccccaccacccgatggcacccacaaccaccatgcacctgcccagccgaggtgggggcctcgcacctgttgaggcgctggtggacgtcccagcagcgcttgcagaggagcaggacgccagacaacaccaccagcgtgccccccacgaacagcgacatcaccaccaccagcagcacgtagttgtccaggatggggtctggctctgcctgcgggtgtgcagggggggtcaggtgctgctggcctggacgacctcctgcccctcccacctgtcccctgcacccaccgtggggcgtccagtggcattgtcccacgacgtcgtcagggctactgtggcagtggtggtggtggtggtggtggcggctgtggccatggtggctgtgggctgcattctgaactggggaggagggccctgtggggaggaagcctggtcagctccagctagacctacttctcctgcaggagccactgcagacaagctgggtcttccctgcaggagcaggagcccacacagggggcagtgactcatggagaggtagcagagccggaggcagcctccacccggcttggctctgcccagcgggccccgggggctctctctggacctccatctcccatccccatggcgggggaggaggcctggccctctgagggtgcgcctgtacccatcacaactgcacacagccggtgcggcctgtcctgcaaggtagcgccaggccctggagctcagcgctgggcagggcaagcactcggaggaatggggacgccaaggcggtgcagccggctcgagaaggactccagacgccctgtccgccccatcacgggggtggggggctacccccaccccaagaagttcagctacaccctggcagggcccacccggccatggttgggtagagggagacctcccgctgcctgcgcgccagggagggtgcaggggctgggcgcgtgctcccgggtcacgactccgggaggtggaggtctccccggtgctgagtgctggtgggagtgcaagggacaaagaaggcgcatctgttcccagccccggagaagctggttcccatggcgactgcggagcaggccgcggctgggggggcgggttgccagggagcggcggggagggggcgcgggggcggcggcctgggggggggcggcggcctcgggggggcgggcgcgaagccgcaagatggccgcggccgcctccccgccgtgcccagcccgggcgcccggagcatccccggccgccttacgctcgggggaaactgaggcggggcgcggcaccagggaaaggagccgcctggacgctgtgcggcgcagccgggtggggaggcccgggaatcgcagggggtcggggctggcgccggggtgctcggcggccccaggtcagcaccgcacgcgcgagacctttcccggagcgagaggagcgcacaggcggcagccgctcctgcccttcccggacttccgcccacacgcgacagcgggaaactgaggcccaaagccgggcagggtcccggcgggggctggtgtcctcagcgctcccggtcacaggctgcccgggccctggtactgggggaaggggccgcatatgtaggtcgggaaatgagttcaggctggagggggtggggacaggcgcaggatggtgaccggaggccggggaagatggcaggaggccgaggggaagaggggggctcctgggggaggcggctgcgggagccgagggcggaggttccccacggggcagcaccgcgcccccgagccggccaagggtggggatggcgagccaggggaggcagggacccgacgccagggctgagccgagacgccatcgtcctcgcccgacctcacagggagaaactgaggctggggcggggcctgagcgggggtccctctggaggcagccgggtggggggcgcaaggcccggatctcggtccccacgcccgccggactcctccgcgccctccctccggccgcttagcccacagccggctgcgatccccggcctgtcccccgtccgccccccgcagccccgagcccgccgcgcctacctcagcgccgggacgagcggcccatgggcggcgggctggcggcgggcggctgcgtggcgctcgcggctggctccggcgcccggtggccgcggagcaggcggagaatttatgaatggagagcgcggcgcgggggaggccggcgcgagaggaggggccgcgcacgtgaccgcgttggcggcgcgcccgctccgcgcgcccggtgctgcccggtccccggcccgccgcccccgctgcgctcgccgctgggtctggctggctccgcgccggccaccgcctccccttcccttccggcggggcggggggcggagcctgcgctcccgggcgcccactccgcacgcggagccgccccccgcacccgccgcggcggccgagccccgcccccggcccatcggcacgattcacctcgcccggtcctgaggtcccagggacgcagctgggggtgtcctggaattcacgactctgcagcccgaggtgcgccgcgtgcgcaggagggggtggggtccgggggggcacggactcccctctcacgttgcttggtccgtgggggttctggggcggcacagccagggcccctcggccacaattcccctttaagctgcacagcccagggtctctggacacaggcgccccgcctgcttccccacgcaggtcccctctggcactgtggaggactcgccatgcctctcctgccccctcccctgtgtgacagcgatcacagaccccggcacaaagctgagcagagcccatcggggcccaaacgtgcactcacagaggcctgctcctcgtggggtgacatcagaacgacacccgcagaaacccaaagcccaaagctgcccccgcttctccctcttagaccatcgaacctcatcctgcagatactcaggccacacacctgccaccagcctggcccgagcgccaccccaacccctctgagcccacgcctaacaccccacagcgcctcctctttctcgtcccaaagaaaggctgacaccgctctggcacgtggctggcccagctcagcctccccgcctctgcccttgcaggtgccctgtacccaggcctctgtccatgcagccagagattcaccccggtttccttcaactccttccccagcttcacagtctcggcgcttctgctcttggcttccagcccatgcctgggtcccctcctctgctacgtccctccaaggccctatgccttgcgccttgcctgttcctgtgtgctgtggggccaccactccgatagctgtgaactccaagggcagccccagggaacctggtgccaggcaaatgggaattgcatgggcaaaggttttgaggcaaaaaagtttgcaagtcaatgcctgtgaaggaagcagagaaatcgtcttgttcccagcaggaccatgacatgggcaggcttcagggttttttgtatttcggttttgctttttggagagacagagtctcgcactgtcgcccaggctggagtgcagtggtgtgatcacggctcactgcaacctccacctcccggattcaagcaattttccagcctcagcccggaaggtagttgggactacaggtgcgcgccatcatgcccagctaatttttgttttgtttttttttgtagagatggaatcttgctatgttgtccgggctggtctcgaacttctgggctcaagagatccttctgtctcagtctcctaaattgttgggactacaggtgtgagcccccacaccccgccaggtttctgatttttaataaagactccctctggctgtgtgaagaaaaggtacctgtactaaacggggggaggctggggcctcctaggcaagagatggtagccgcggtggccatgctgggtgcacaggccgggacagggcggaattccagaggaaccccaggtttggggctggagtaatggcgccctcacccgtgggcgaccctggagtggggactggagggaagtggttccacgagtgagactgagtctattaggcctcccagtttcctggagtggcagctggatatgcggtcctgagagccaggaggtgcacaggtcacgactcgaaaagtgaacaggcctcctcctctgcaccccccgagccagggccaggatgaccaggctccaagtgaccgtcacagcgctggcccggtgggaggagccaggcccacgccttcatcctgagtcggaccagcagggccttcttcaggtgcttgggttccaggggacagtggcgcccgccattgcactggcctgaacacgggcagggggcgagggtgcagcctccggatgtagggagccacggatcgtgtcggattcgcccacagcaggaggcattggatctccctggctgcacccttgtaaagccacagccccagggcctcccctgctccctgcacccctggggtccagcccaccgcgccaggctcaaggccctttccagggagcccgagccccaacccccgccatccccgattccgcattttcccggagcctaaggagcggggctgggggcccggccgggtgccgcagacctgcgtgagcgcgggggcggggcggtgacgtcatagccgcgagcgaggctgcgcgggccgctggctgacggcagcggagccccgagccgcccgcgcacgcgctcctgcgtcagaggcgcacgggggcgacggccaggcaggaggtggggggtcggcgagcgcatctccgggcgcggagcgccctctgccggcgtcgaggagcagcgcgccggggtccgggatccccagcgagccctcccgcgtcgcccgcgctgtgcccctcgccgcggtcgccgtttcctagaacagctgcacctgcagccttccaccctgtcccgtcctgcacactttctcggcttttactgtgatttatttttggcttttgccaccacctaccactacgacctg[132 bp omitted]tcctgcctcagcctcccgagtagctgggattacaggcgcccaccaccatgctcggctaatttttgtatatttagtagagacgaggtttcgccatgttgaccaggctggtttcaaactcctgacctcaggtgatccgcctgcctcgccctccagatcggataaagtgctggaattacaggcgtgagccaccgcgcccggcctgacctgcttattaatgatctcaaatgtctgctaaataacccccggccccagagtgggattctcactctgttgcccaggctaggcagtggcgcaatgatagctcactgcagcctcaatctccttaggcccaagcgatgctcccgcctcagcctccccagtagctgggaccacaggcgtgcatcaccacgcccggctaattttgattatttgtagagacggggtctccctctgttgcccagactggtctccatctcctggggtcaagtgattctcctgccttggcctctcaaggtgctgggattacaggttggagccaccacacctggcccagagccggaaacttgatgttttcttgatgtctatccagggccctgcatccaatgagcgccccaaaaatctttttttttttttttgtacagacgggtcgggggtgggggcgatctacactattgcccaggctggtttccagctcctggcctcaagtgatcctctggcctcagcctcctaaagcgctggtattacagtcgtgagccaccacgcagccgaatcttgaatttcactgaagttcgttttactccacctcccaggacggtttcaccgcccttatctgaccaccccctggttctgccgcagcccgggccggaacaaaactgcaacccccagaatacctcacgacggggcactgcgtcgtcaacgtcgcgtgcgccctgccgggagtcgtagttcgcgcttgcgctctcgccgggactcctcctcccagacgtccctgcgcgtcgtcctcctcgccctccaggccgcccgcgccgcgccggagtccgctgtccgccagctacccgcttcctgccgcccgccgctgccatgctgcccgccgcgctgctccgccgcccgggacttggccgcctcgtccgccacgcccgtgcctatgccgaggccgccgccgccccggctgccgcctctggccccaaccagatgtccttcaccttcgcctctcccacgcaggttcgggcgctgcgggtcgggaccctccgtggccgccgcccccggagtccagggtccccacccccagggcgcgacccccgcttccgggcccccggacccgcgcgccccggaagccgaggctactcagccctggaccctcggccctgcctctgctgcccgagccctgcgctgccctcgtcccgggcacctccccgagataagcgtctcctgggtgccctccccgatctccctggccaaagcctgggtgtcgccggatcgttgcattcccatttcgcggatcagtagaatgaggcgcaactgttgaggaccaaagctgcaacttcggatccctgcgctgggttgtctcagtgcctcacatcagcgccaggtcctgccctgacccattacttagcaggacaggccgagtgcccggtgggcgcggggccggcctgccccgccatcattccccacgctgttgtctgcaggtgttcttcaacggtgccaacgtccggcaggtggacgtgcccacgctgaccggagccttcggcatcctggcggcccacgtgcccacgctgcaggtcctgcggccggggctggtcgtggtgcatgcagaggacggcaccacctccaaatactttggtgagtccggtggagggctgcagggccaggccaggctggggctccacatcccaggtcagtctccgtct[133 bp omitted]tgt[213 bp omitted]gaggagattgtgccactgcactccagcctgggcaacaagagtgaaactccatctcaaataagaaaaatacagttttagcaggtttgtccactgaggagcctgggctggccggtgatgaaagcgaaccagaggggaccctgctctcagccggtttatgactggctctggaccaaccaatgtaggatggtcgaagcaagagatgtaaaaccacccaggcccagtggttcatgcctgtaatctcagcactttgggagactgaagtgggagaatcgcttaagcccaggagtttgagactagccttggcaacatagtgagaccctgtctctacaaaaaataaaaagaaactgaccaggcgaggctgggtgcggtggctcacacctgtaatcctagcactttggaaggccggggtgggagggtctcttgagcccaggagtttgagaccagcctgggcaacatagtgaaatcccatactacaaaaaattagctggttgtagtggtgcacacctgtagtcccagctactcgggaggctgaagcaagaggaccgcttcagccggggaagtcaaggctgcagtgagccaagatcatgccactgcacttcagcctgagcaacaagagtgagaccctgtgccaaaaaaacccctcaaaaaaccatgttgggagggctgatcagattaggggaggaaggtcatttgtgcaggaaaaaaagcagttctaagcctcactggtttccagtggtggccagatttgaactcagcttgcctttggccctgaccccagctcaacccatgggtggtgggtcagagggagggcctctgtccccaggcagtgcttttgggggttcctccagcttctagtcctttcttgcggcccctgttttgttcttctctagcagttgcccgccatgttgggcccagggccagtcctgtgggtctgtttgcacactcaggacacagacttggatgtttgtggagctcctggttcacagggggctctggacttgaccaggggagtccctgaggctgtgcagccctttggggtctcacgccttccccccgccccattcccccagtgagcagcggttccatcgcagtgaacgccgactcttcggtgcagttgttggccgaagaggccgtgacgctggacatgttggacctgggggtgagtgtcagaggggacctgaggctcagcaggttggagctgtccaggctgcgggggagggagcgctgggggaccaggagccgggctggggtcgctgctggcccctcaccgcccctcaaccccttgcaggcagccaaggcaaacttggagaaggcccaggcggagctggtggggacagctgacgaggccacgcgggcagagatccagatccgaatcgaggccaacgaggccctggtgaaggccctggagtaggcggtgcgtacccggtgtcccgaggcccggccaggggctgggcagggatgccaggtgggcccagccagctcctggggtcccggccacctggggaagccgcgcctgccaaggaggccaccagagggcagtgcaggcttctgcctgggccccaggccctgcctgtgttgaaagctctggggactgggccagggaagctcctcctcagctttgagctgtggctgccacccatggggctctccttccgcctctcaagatccccccagcctgacgggccgcttaccatcccctctgccctgcagagccagccgccaaggttgacctcagcttcggagccacctctggatgaactgcccccagcccccgccccattaaagacccggaagcctgactgtgtgctcggctcttgttcctccacctggcccggtgaagccgggagcgtcctgggcccctgctcacgtcctccatgtcccttgcaaatagggcctttgagctcccctggactatgtcccttagggcacctggaggtccgtaggaagcaggctcgagggggtgggtggggtgcagccaggcgggcaggctgctgaccttcaccctacaacggtggggagggtgaaggtcaccagtgatggggacatcggtcagggaggggtgtccctgctgctcctggcgcctctgccgagttcctggtctccaggccttgaccctgagccctgctggcccttggccctgcccaccagcctctggaaagaggcgggccccacccgctcccacgctggccccgccctgtgccagccggtcctgtgggtggccctgcctggccgggtgccgaatctgcagtgtttttggcacctccgtgggcacctaggcttctgggttggccccagatggagtggggtgggcccaggagggggcggctccctggcactgccccgttgggcctgcctcttctcctttccataaccctgggggcgggcaacactggctccagctggtgtgtggacggcgggggctggggtctcctgacctcctcccttccttgggacagggccctgtgcagtggggtaggcagggaattccaggggggtgagtggggagggtgggcctgcctgtgtcactggagctgggatggtgacagagaggccgccccgggcctgtcagcacggacgggcagctcactcccacgtcatggcactatgcgggtgacttgccacagcttcacttgaggcgaggtgccgttgggggccttgcgactctgaggccgccggtcagcagatcaggtattctggaacagcccacggtcccctgcctggctccccctccacttgggcctcgggacacgagtgaccaggcccccacttctccaggaatccgcagcccagggaaggttgtgtcagccaccaggccacaggagcagcctctgcccaggccccccctcccccccgcccccagttccagccccaggtcttcaagttcctgccaggccaccaggaccctataaataagaccaagggcacagctgggacttagcaggggcccagcgggaggagctgctcactccggggacctcccctgcccccaccaccagggagggtgtgaaccttggagccaggcctcaggacacccgagacacctgacactcggagggaacagcccgtgctggctggatgcgtcctggagcaggaggcagtcagggtggggccgggaaccaggcggtcaaggcccttcagtgagggcagcccctggcttagtgaggcagaacagagcacagggtttgtccccatcacacccaggaacaacccactcaaccatggggacgccgagtatgggaaatggtggggaagcgttttagcatgtttattcatttagactggctctgggcatctggtccccaaagggccacacagtggcccctgtgaagcccagcaagttccgacaacccgtgtcccattccactcccgaccagactgaggtgatggtgtccattccactcccgaccagactgaggtgacggtgtccattccactcccgaccagactgaggtgacggtgtccattccactcccgaccagactgaggtgacggtgtgcaggtggcagagccacacacgagaggcaagaggcagggagggaggtgggggctgctggccactcacagggggccccagtgtcctgcttgggctgctcatttggcaccagtccacggctccctccgccacctttgttctcactggaagcagaatgagcctggccctgtagttcccacctggggccccagcccttcatccaagccccattcatcgaccctgcccctcctccctccaactgggtccagttcactaagctcccagaactgctcaagccattcccacttcctggaccatcgtcttttttttttttttttttttttttttttgagaggagtttcgctcttattgcccaggctggagtgcaatggcacaatctcagctcaccacaatctccgtctcccgggttcgagcaatgctcccgcctcagcctcccaagtagctgagattacaggcgcacatcaccacgcctggctaatttttgtgtttttagtacagacagggtttcaccatgttgatcaggctggtctcgaactcctgacctcgtgatccgcccgcctcggcctcccaaagtgccaggattacaggcatgagccaccgcgcccggccttttttttttttttttttttttttgagacggaatctcgttttgtcgctcaggctggagtgccctggcacgatctgggtttattgtaacctccgcctcccgcgttcaagcgattctcctgcctcagcctcctgagtagctgggactacagacacatgccaccatgcccagctaatttttgtatttttagtagagacagg[148 bp omitted]accgcagcccctgtgacccccttccaagggttatcccagcctctccctctctggcctagccctgacccttcggggctgggtgtgcctgtcaaggtgggggccacggctgccgggagcatgggtggcagccggaaggagacctggggaggagcgcagccctgggaggggcgcccatggccagggtgggggtggaggtggtcaggccagataaagggaggggccagatgagtggacaggaggtgctcccgtaggaatggggtccccttctctaaatagaggggcaggacggggcccacctcaaccaggaccatcctcaaaaagccgacggggaagggtgagatgcacaccacattcgtgtctcattggctgtggcctcagtttcttcatctgtaaaatggggtaatgcccaccccaaaggctgggaaccagtgcatgtcctgcattaatggggggtgatggccccaaagtgatcctgccgcatcccctcaccacactcccacccaccctggagaaactgaggcttggagaggccagttacctcccggggtcacagcatagccggctggtgactggctgggcacaaggcaggcctggcactggctaatcgctccataaatgccctctgaggtcaccattgacagatgcaggaggccagggctggccagggcacccccactctacggcaggtgactccagcctgttttcctggacgacagccgctgactcaggcccctcttcccgtcccccccacgcgggcgcccccaggcggaagcaccgggcctggggcgacaggaagggggcggggcagcgagtcgcgctgtacaccccaaaaccctgtcccgctgacgattcggggtgcatctcagcccgcggcgaggcgggccgagacccttggctcggggcattcaaggggagtccccccatgaactgcgccaagcctgggtcccgggtggcccagccgtcaaggcgccccagggccagggccggcaggcaggggcgggggccagtctgcgtcaccgcccgcccggccccccgcccccctgcccgccctaactccaccccgagggaaggcggcgcggataaaggctgagggccgcgcgcttggcccagaccggcccggccagcgcgcattcggccccggacgaaggtactcgcagcacttggagcgcagaaccggccgcgcccggtgagtgtggaggggggggacctgcgggccgaggaagggtgcccactctagatggctcaggatgcccgcacttttctttgttcttgggacaggagggatcggggagcctccggtcctgggaagccccccggggtgcggggtgggaggggctccgcgcagccagcgccgccctggccggacctcagcccccgccccgccccccggggcactcccccttcaccgcgggtgaccttgaactggttgccgttccgccctccgttgcccagccacacggtcccagtctcccgactacagtctttcgttcccgatcggggttcctcccccgcgcgcagcccagtcgtcttcctcccctgccaggggcagcgcggcgccccctccccgggactccgggcggcgctcccaggcgggcccggcagagggcgcgcccgagctgctgactcaccgcatccccgagcgcgcgcgggcgcagccggggacgccgcgtcacgtcacggctcgagcgggcgcgcctcggggaaacgggttctgcccgcggccggcgggtgggcgcgcggggcccccggcggcagccacccggccacgtcaccgaggtgcgggcgccccgccccggccacaactccgcccccacgcaccacgccctccccggggccgcggccctagcctcaccgtcgcccgcccgccccgggaccccggccacgaggcgcggacttcgcgctcccgcttccgctcgcggcttttcccggacgaaggcggcggggtggccccacgacttcctgcccctcccggcgccgggaacaatggcccgcgccccctcccgctcccggccgctcccttgggatcgcgaggggtaccagacccgtctccagacctgggtcccgcgccccccggggcgcgcccgccctttgttgcgggctccgggcgcttatgaatggctgcgggcgcgggcggggcgggggcgggcgcggagaggcgccagccccgcccccgctgcgctccccttggtcgcctgggcgctgggggcggggcgagggggcgggcccggctgccacgtggggcggtgccgcggcggctctcataggcccgggctcgcggccgactgggcgctcggcgcgcggcgattggccggcgcccggccggcggagtaagtagtgaatgggagggggcggcggccccgccccctggaacgttgatacattataacttttttttcttgttactttcacccccagatcctccgagcggcggcgacggctgttgctaagggaggggacgcgcgaggaagcgcgacccgggcggcagacggcacccagcgccaccagccgagcggcgccccctccccaggacccttaaccgcgccgcgtcccggtcgcgcccgccgccctttgaaggagaagcaagtgccgtccccacccccggaaggcgcccccaggagccggagcgacctcggagcgccactcggattttggatttcggtctcgcattccgcggccgggactttctcgaggaggacgcgcgctgctccgcgcccccgagtgcccggaggacccggcatccggggagcctctcgcccctgtcccggaggcgcggcgaggattggcggcgcccgccgcccccagccccccagcgcgcgccggggatggagccgcagcccggcggcgcccggagctgccggcgcggggcccccggcggcgcctgcgagctgggcccggcggccgaggcggcgcccatgagcctcgccatccacagcaccacgggcacccgctacgacctggccgtgccgcccgacgagacggtggaggggctgcgcaagcggttgtcccagcgcctcaaagtgcccaaggagcgcctggctcttctccacaaagacacgtaggtaccgcgcgcccccggccggccgccccctcgggccccggcccccgggcgggaacaaagagcgcgccgcgcggggaaggcagggggcggccagacagggggcgggggcgcgccgcgcgctctcgggcgccctctgctcggcctcgcctgcctcggccccctcccccgcccggggtcgccgcacaaaggcggctgcgagggcgtcccgggccgggcttcggcggccccccttgggggcgggcaggaatcccagggcgttgcgggggtcccggctgcgggtgtgggggccgccaccgccccctcccgcctgcgtccgcgccggcttccgcatctgctcggcggcctcctctgcgtctggctgtctccccccacttgcgtctctctccccccctttgttctcgcctccgagcgctccccgcagcctcccctcccccctggtatttaaatcgcctgcaggcccggagccctccccccgcgggcctccggggacacgcagtgtccatcccagtggaggggcccatcgggggaggggcggagggggagggtctcctttgtctgcgcggcggcggccgcctgcgccggggagggaggaggagggggagcccggcccggcgcaacccccagggcctctcctcgggccgaaacccgtggttcctacaaagaggagccaggactagaattagggaattgggggcaggggctgccctggggtcgtgggggaaggtggcatagagcacactggggcccagaggaggagaaagtgcctggttggggtgcagagggggtgccagagtccagggcgggggttccactggagggaaggggtccgaatcgccaggatggggctcccagcaccagacggagacctctctgcacgcgcttagggccctggatctggaagccgggaaggggtgggggtgggaacttatccgtctctccccacacaagcacagccctcccccgcggcctctgcttccgcgtccctgtgtcgtctccgcggagtctcatgctcttccttcctccccccagccggctcagttcggggaagctgcaggagttcggcgtgggtgatggcagcaagctgaccttggtacccaccgtggaagcgggcctcatggtaaatggccatggggctgcgtgcccccagaggcccccgcacacaggcagtagcccctccctcggtacctgtccgcacacacactacctggggcccccaccccgccagccagcagggccctctccaccccctattccagcccaggattccgaccccacactcaggcccctctcctccctctctttgtagtctcaggcctcaaggccggaacagtccgtgatgcaagctctcgagagtctcacggagacgcaggtaagacctcgccagccccttcctaacagggcagccctgggagcagggtgccttggccaccgacggggcctgggggttgtctgtgctcccaggaggctgggggaggggaggggacgcgccaccccgcctgggtgccagcctggcctggcctccccacctcctctcccccaagattcaccacctgacccggagggctttctctcccacggtggctgccctgggggaagggggcctggctttcacaagactgcctgcaggatgaccttggcctatggggcctcatccccgctcacaccctggcctgcatccccagccccctccgcccccaccgaggagcccccctccagccgctgtggcttccccagagcgagtttctccttttttacatttctgctgagggctgggggtggcggcttgggtgacactccttccgccttccgtgacccccatcgtgagagggtggggatctcgtcaccctcccctcctctctctggcctttgttctctaccccgaaaggggagggggcgggggtgcccagccctggggccagtgaggcctagacaggatgttaggaaaatatttagtaagcggccaggagggaggctggggctggccctcacccggttcccggttttgctgcggacttttttttttttttctccttctttcctcattttcttggctgcggccaagccttcctcagacaagggccctggccacctcccaggagggtgacacaggcctcagcaatccgcccgctgccagggtgggggacgcaggctgccacccgccccagcaaggggtggccggcttcccgggcctccctggccccgaggcccgcacccccttccgctttcccagcggcatgtagagtcctgccctttccctacatcgcgggggcagggcgggggccgggagctgggtggtctgccatgggggtggccacagcagcagcagcagtggcgtgggggcagagccggggtcccgagccagggcgggggctgcaggtgatttcctggggcgagtgtgagcagagctccccgccgctggggggctgcggttggcagggggcccagggcgtgttggcttcacaccctcctccctgggcgcctgcgtcaggaaggagctgggttggggggggctggagggggtgctgggcggagacactgggctccccagggttgcttccctgcctggcaccgagtcatgcccgcccattagccttccccagggaggaagttgcagggcgggtggtggtggggactccagctgctctcgggaagccaccccgggcccttcctgcaaaggctgtcttggggcaggggggtagggggccgggcaggctgggccgcagggtgggggcttcaccctgccctcctccctgcctccctccccatgggccccaagcagagaaggttacgccagctactgccagtggagaggagagccgggagggagagctgggaggcggtcggttctgagtcatcccagcctatgtcacttctcagaaacctccgccacccccccccccatcccggccactggggagagcagggctctggcccatacccagagcagggggcttggcgaggacagggtgagattcaacccacacccaccctgaacgggggcagattgagggtttctgtgcttggagcaggttgtgccctccgggactccagccccagggcggtcagggccccttcctgcagccttgccacagccccctaggcctccgccccgcccaggacagataaatatttatcttgagaaagcaaaggttaggacagaagaattcgtgcaggaattccacccacttgctggccctggtgacttagctgggagggggcctgaggtggagcccctcccgtatccacaggcagagaggatctaggggcccatgagggtgggggaaaggcaaagtgaaggttgtttgaggtcagtgactgccagctgggccccgccccctctggcctcagtttccccttgcaagaccgacctagttggccagggaggggcaggcccccgtctgacccgcctctgtccccacagcccccagcggcgcccgggccgggccgggctggcggaggaggcttccggaaatacagattcattttatttaagcgtccgtggcaccgacagggaccccagagcccagagaggggcggcgagaggccccaggtcacagcgcggggggactgggccgggctgggctgggggcgccgcaagctggggctcccagctgacggaccgctctccttgcaggtcagtgacttcctgtcgggccgttcgccactgacactggccttgcgtgtgggcgaccacatgatgttcgtgcagctgcagctcgcggcccagcacgctccactgcaacaccgccatgtgctggccgctgcggccgccgccgctgctgcgcggggggaccccagcatagcctcccccgtgtcctcgccctgccggccggtgtccagtgccgcccgagtccccccggtgcccaccagcccgtcccctgcatctccctcgcccatcacagccggctccttccggtcccacgcagcctccaccacctgcccggaggtgagcctggggaagggaagggtgacccttggttggaatccaaagggtgggccgtcctggggaggtcttggggaggacaaggactcttagtcccaggtgagtcccttgtattaagggctatcctgtgacctcgggctggtgggtgatcccccagcctagattggtggggtatttctagatcctgagttgacggtcatcgcctgacatgacctggaccagtagatgatctcttgatctttgactcatgggtcatctctgtgtcctgggttggttgtgacctcgtgaccttgggctagtttatctctaaaccctgtgttgacaggtcatctcctgacctgggctggtgggtgatctctggtccctgggttgctggtgatcccctgatcctggaccccgtgctcatgtgccccttcctcccatcagcagatggactgctcccccacggccagcagcagtgccagtcctggtgccagcaccacgtctaccccaggggccagccctgccccccgctcccgaaaacccggcgccgtcatcgagagctttgtgaatcacgccccgggggtcttctcagggaccttctctggtaggtgtcacagcacatgtgtgagctcacgtgtgtcccgtgaccctgtgcatttggggtctacatccacccacaggcgactccacatattctgggcatacacaggctgtgtccgtctgctcacttcacatgtcccccaggaatcccccacacacacgcctggccctgcccggggggccgcgggtcaccaggcgcctgcatactggggacgtgtcccgctcccgccccgtggtccctcgtgcacatcagcccacatgtccacgccattgcctgagctcatgagctcacacccgtggacgcccgtcctggacatgcgggactgtgcccgtgccgggcactcacggccacctctgcccgcaggcacgctacaccccaactgccaagacagcagcgggcggccgcggcgtgacatcggcaccatcctgcagatcctgaacgacctcctgagcgccacccggcactaccagggcatgcccccttcgctggcccagctccgctgccacgcccagtgctccccggcctcaccggcccccgacctggcccccagaactacctcctgcgagaagctcacggctgccccctcagcctccctgctgcagggccagagccagatccgcatgtgcaagcccccgggtgagtggccaccctcgggggtcctaccttccccgcccgcctgggcttctcaaggcccctctgtgtgagctggtgggctcaggagcagctgacctgcccaggggctgggggggatggcagctgccgtggccactgctctgctccagcccggagagaaggcagcatgtgtgtcagggcacaaagtgtccttgtgtgctcccggggggccacaggcccacttcctcctgccccacccccacccggggcatcatctccagatggcatttggtgcctctgtgaatggccaagtcaggcctggcaggccgaggcggggccagagcccacccctaagcatttcagtgacttggaaaagcagcgaacacaacccccctgccagcctggccccagctactcccaaacggcgggttactccctccagagtctcaccagaagatggctactgtactgcccttgggctctgcaccc[142 bp omitted]tgaaactccgtttccactaaaaatacaaaaaattagccaggcgtggtggtgggcgcctgtagtcccagctactcgggagg[144 bp omitted]cctcggatcacagaagcggccaagccccctccatgtaggactccaggaagaatgaggcaggacagtcctgacctccccagctcatggctgagctggagaattagaagccagctgcgtagctgggactccaggcaaacaccaccatgcccagctaattttgtaatttttgtagaggaggggtctcgctctgtggctcaggcctgtctcgaactcctgaggttgcccaggcctgtctcgaactcctgagctcaagcgattctcctgcctcggcctcccaaagtgctgagattacaggcgtgaaccactgtgcccggcatggtggatgtccttgactgtttcctttgctgacctccctccagggagggcaggactgtgtctgacctcaggggcatttgctggggtctggggtggtcctctgtgttcagcaggtggaggctttgggagtcacaggccactacctcctttgcaggggaccggcttcggcagacagaaaaccgcgccacgcgctgcaaggtggaacggctgcagctgcttctgcagcagaaacggctccgtagaaaggcccggcgggacgcgcggggtccgtaccactggtcacccagccgcaaggccggccgcagcgacagcagtagcagcgggggcggcggcagccccagcgaggcctccggcttgggcctcgacttcgaggactccgtgtggaagccagaagtcaaccctgacatcaagtcagagttcgtggtggcttaggatcttcggatcggccaccctcgcccctcgcaccccagcccagggcggcggggactccgagagccccggagagaacgtggcccagccctggagggcaggcggccactcccccagccagaagtctttttttcttttcttcttttttattatttttttctttttttaaaaagttctgaccgtggtttcctggactcttcatgggctttgcttcctacctccttcacccttcactcctgccctcctcttcctcctcctcctcctcctccgtctgtctcctttcacctctgcgccaggtcggtcctccctgccaaccttccccagctccaatatgtagcagtctctctggatggcggagagtgaaggagacggagaaacgcgccccatcccttccgccgcctcctttcccccccgaccctattcaggttttaagtcaaaaatgtcgatatgtcattatgcactttacagatgaggggaggggccgcagtgcgcagaacccaccccaccccccagtgcagacttcggggtctccaccccaggccagcagcgcccactgggctacagcaagccaacaggtcacagaagccaacgaggggactgtttctcttccactcctatcctcttttcttgatcttttttttgcattttccttcatttctttaacaaggagagcaaagctgttttagcagaggctggggctgaggtccccatggggtttgggtgcaggggcatggcaccctttcctgtcgggaagggagaggggaactacccccccagcctgccctccgccccgccccagccggcggactgtgctgtttcctccgcccccactcccgtgttttctgacctcctgcctgagtttggggtatttatagactattaattttctgactgagccaatagtggttggggaactcttgaaaaaggggagagaatggctgggtgctggggagttcccccctccgagccctccttcccggcccaacctgagggatgtggatttgggactgtctgggggcccctcctgcagcgaggatgggagggggtgctgagctgtgaatcccctgggcagggggcgacaactccgtgtagcattaacccccgtggcggggtccgctgctggtctaatttggaccccctgcctctcagtgcccctgccctaggggtgtctgtctccagaggggagggacaaatcccctactggggccatttcaatggggtagtttttggatttttttccccactcactttttattttttaatgataatggagatgtctggacccttcctcaccccacctgtcggtcttgtcctggctctgcctgtcccccaccgttgttctcgtaggtgaaccccaggtcctcaactccccccctttatgtgttgaaagttaatggtttcagatgtgaacatcacgtgttataactgtagcgctgtaaatttttttgtgggagggtgggcagggaggggtcccagagggtagagctcaaggattttgggttttgttttgttttcatttttccaaaaaaaaaagaaaaaaaaatagaaaaaaaaggagtaaaaggggcgggtttgttttttgaagaactgtcttggatacctatttaaatgtgtgttctgttttgttttttaacgatttttaaataacgtctgtgcctccactggttgagggtggaacctccaggcaggaaccggctcgccaccctctgcccggtaagggctgcccaagaaagcattacccgccctcggggggtcgggctgtgggggtcccggcacctggcgtgagtttcatgtatgaaaacataaaattgaaaaaaaaaaaaaaacctacacgagcaccgtgatttcaagtaataaacagaaaatgaaacacacattgactcccgcctgctcgcctagtggggggatctggccttggttgggagggttcctggggtgggatgtcagctcagggagtcagagggactgacctgggtcccaaggccccgaagagggggtggggcaggggtcagggccctgagaatttcccacgctccttccccggctgccgggtgggcaggaagcagccagggtgggagggaggagcccagccacttcctggtacccaaggccggaagtcccttagggtgtggggcgagggcctgcctgcctgcttcgtggcctgggcaggaccctggccccctcaggacctgccagtatgggggagacgcgaccaccagctctccccagccacaggagtcggggactcccactctgccacacccacctgctccccttcctggagtctcacatctgtgtggcttgctgcagggagatcaccaggccgactgggaggacctaggactccgcagggtaccttgggctggcaggtgatacaggcctggcttgacccagccctggggggcctctctggccacacctcctgacattccagcccttcccagacctggccttcagctccaaacctcccggcctttgccccctgtctaggaacacccctggtccggctgtcccttgctgtctgggaacttccccagcctgcgccttccacccctgtccaccccgtcccgcagaccccacccttccctctctctgtccctagcctggagctccccgtgagcctcaccaggactgagtcctctctggggtcccacctccacccatgtccgggctgggcagagatgaggcaataacactatttcatgtctttttttaaattttgtaacctgtatttcctcaggtaacaagagttgcctatgagaagtaattgggctcccattttatagatgggagaacagaggcccaaagaggaacatcacttggcccagaggatttggggtgtttgttcaatgatgtgacctccaccccttatcccatctctaggggccccagtaccgggagcccccaggggaaggggcacaggttcagagagtggcctgggagcaccttcctgagacccctctgcccctcccaacgcccagtcaaccccaaatcatcgcacgcccacggcaggaaggcggatgcccagtcaggcggcacccaccccccgccccgtccctggtgcggatgtcccctcggggctcagggtgggggtgcgggtcaccgacgccaggcctggggtcaaggcgagggccccagggcgccaccgccccctcgctgggcggggtgggaaggaggaaggaggatgttgtctgaagcacctgctgaatcacaggggctgtgtctgtagcctgcagggtggggggcgcgtcccctgcactccaggacccgcccctcgggatgccgacccccaccccagactggggatcccaggggtcaaggctgtgccctgggggcgtggggtggggtatggagctccaggctcagagccctggcctggtagggtcagcccaaccaggggtgcagcgggcggaggggcggcaggcggaggccaagtgtgcgtagggaagcacggagaggtaaactgaggcacaaagagggcagggaccgctgggatctcgcggggcggggtcggccctggatcgctcccttcccccaaccattgaggaaaaagctgaatgggagggggcggcccccggaaacccgccgggatggaaacgcggtttccagggcaacgcgccgcgaaaggagcctgacgtcaccccgggtagggcgccctgcccgcccccgtccgcgcgtcgcgcggcccaggccccgcccaccagcggggaagcctcattggtgatcgcaccgctcgctcatcggcgtgccccagtagcagcgcgacgaagcctccagaaggcgggacttcagcccggcagcgccgagtgcgcaggcgcaagcgcggaggcgctgcagccccgcctctctccccgcgcgtctgcaaagttgggggcgggaggcgcagccgagggtctgacggctgcggcggggcctggacggaagagggggcgagccccggggcgccgcacgtggacccccggcacgggcacgctcacgtgcacccgtcctttcacgccaacgcgtttcctgctgcccccacccctgcaccactgcacgtcccagaccccggcccagcctccccgcggtccctaggctgggggagctcagacaggaggctaggaggagggggactttggggctgaggctttgccaaaggagcaggagtttgccaagtgttgtaggaagcgggaagggtgcgccaggtagggggcacggcgtgtgccaaggcccggaaacgtgaaaccgagtgcttttcgggggcaaccgggaagtcagttggtggagaaaaatcaaagatgggaggaaaggcgaggctgacaaggaccctaaacggtgattccccaagtcggccactggagggatgacttgggggaccagagaggaagagcaggtgagggggagcggcggccaggacatctgggaggtggctagacccgtggcctggactttggggggcggtcgagttggatcgatgatcgatggggaccctggcggcctcaccctgggggaggtagagacgaaaaaggaactacggtgtgcccggaaggtggtggctttaggtccacagggaggtggttggcaaggcgggggtaacagggggaaggagaaaatctgaaatgccggtgtgagctccgggccaagagagttgaggactcaggaggcaggaatcccccgtggccgcccgctgcttggctgtgggctccaacttggtgtgtgctcagagaaggcagtggttggagtgaacagggcctgtgccaggtggggagactagccaaggtgtttgtgcagcctggcctctggagcggcctgggaagagctggagttcgcagggtgggagctgccctgtggctgggagcccgtgctggcgtccctgccaggcggtgatctcacaggtgagcggtgcttggggagacgcggagctgtgggcgggcaggagaaggtcagtggaggtcatggcttttggcttgaggccggagtcctctgggggtggccgaatgcgcccttggagctgccttgggaggtggctagggtggacagcagtggaagccaggcccttggcttagagccactgggttggagggattgagccagtgcccgggcacagccgcccccacagggccttgccccacccgccctcctctcccagcaccatgggaatgggagttaccgggctggaggctggggacgccaccaccccgtggccaagggcgttggggcccaacccaggagcctggtgcagccccacccacgggccgcccagccctggaagggcagagaactggctgcctctggggtcacttgggacaggtgagcagcccagcccagcccagcgggtgggggaggggaggctgtcacctgggccctgcctccaccctctttctggttctcactccctccatttctctttcttttgcctttctctatttctgtcccgatctctggcgctctccccaacccagtaccaccatctccgcccctccgtccctcccctgcttccgccccctctctgggggcccccttcaccccggggcacattccagcttcctcccccgccttgcagtccctccctggagccagctgcctcctcggttgccagagcagagagagtgggcttgggccgaggtcggaggtcgaggagcgggcgggagcctgggagggcacccccaacccctctggaatgtgggtggagcggggcaagggagacagctggtttccacggagggcacatgccccatacccaggacgctacccacactcagccctgggggagagcaagcaaaaccaatgggtgccatcccacgaggggcctgcacagccatcccacacccccgaccagcacgcccgggacagccctccacaggccacgcatttatgggtgcggctggtgtgccaggctcccagatacacaacccccccccccagacacaccccatatacctgtccccaacctcaatccactgtgtgaccctaaaacaaacagaacctccttgctcagcctgggccaaggcctccccaaacaaaactccagcctgcagagtcccaccacacaccgcagctgtcaccagatacaaagagggccctgaccagatacagagagggcagcagccttcccccacaaccaacacacgcctgggcgggggcaggaacacccccagggcctccagccacagacactcacccactcacccctctgtgcaccagtgatcctccgctgcccagccaagcttgactccagcctgctggagtctgggtgggggatggagaggggttcccaggcgagccccaacctatgccttccaaaagtctttctgtgcatgttggaaatacaaatgaaacaggagagttagcatacgggacaattattatttttgtttgtttttgttttgagacggagtctcgctctgtcgccctggctggagtgcattggcgcgatctcggctcaccgcaacctctgcctcccgggttcaagtgattctcctgcctcagcctctggagtagctgggattacaggcgcccgccaccacgcccggctaatttttgtatttttttagtagagacgggctttccccatgttggccaggcaggtctcgaactcctgatctcaagtgatctgcctgtctcggcctcctaaagtgctgggattacaggcgtgagctacagcatccagcccaattttatttatttttagtagagaagggatttcaccatgttggtcaggctggtctcaaactcctgccctcaaatgatccacccgcattggcctcccaaattgctgggattacaggtgtgagccaccacacctggccccagttattagtattttcgagacggggtctcactctctttccaggctggaacgcagtggctccatcacagctcactgcagcctcgctggaactcctgggctcaagcgatcctcctgcctcagcctcctgagtagctgggactacaggtgagcaccaccatgcccagctaattttgctttttttttttttttgtagagacagggtctagctatgttgccccggctggtatcaaactcctggactcaaacgaaagtgctgggattccaggcatgagccagcgctcccggcctgcatacgggatgattccatgtggactgccacatcaaggaagcaaacaacaaggaaagcctggcgctgcgtggagctgtcttttgctgctaactgcccttgaccgacttcctaccaggtcttccctgtgcgcctctaaccccaggaggtgctgctggcatgcccacctctcagatgaagcagtgcggtccagagagcgtcttgggcaccgcctgcctcacagctgggcccctgaccctccagggactgtggctgagcagccatggctgcctggacgggtgtcccctggcccgtctgtccgtctggatgtgggaaccctccaggcacgctggggcgggcaggtgccaggtgcctctccagcaagatgcaacataggtgtcttcacttgcactccgtaggtcctgagcccctgcagctgcctgggagagtggggaaatactctccacttgtcccactccactgttgccatggagatacctcccaccctaggcagggccaccctgagcctggttggctttgcaggaaatccccactctttgacctctctgttaggcacaggacgtgtagtcccatgagagggaactgggcccaggtggagatccatccgcctaccccagagcgcgcatctgttgctaagcaacatctgaggctgcatggaggtgggggctccggagcccccagaccttttcccagtttcagaaactaggtggctgcatccccagcgtccacgcaggcgagcctaagcctcggtcagctttagggtgtccgtgggccatgcagggtcttgggcctttcacagacacctgatctgcacgtcacagacacgcatgggtgcacgtcactacacgtccgccacatgtgcttggctggtctgcgccccagcagaaggggtcacctatgtctctgcagtatcctgtgtactgaaagagcaaacaggtgtgtgaccccagggcaggtcggggtccgtcctgtccccagcctgtctactgcgtgtgcctgtggcaggcagggtctccggatgccgagtgcatggtgtatgactttgtgtccagtgggtacgaagcaggggtgtgggtgtgcacctgtgtgtggcctgtggcggggtgtgtgtgccggggatgtccctctgtggcccaggcctggcctttgggctgctgggatggcctggccggggcaggagtagacagggcctcccagcctccacattcctgagctgtgactcaggcctgtggggagggggtgagtcacagggaagggaagccgacccaccctgcgaacgcatccgaggaacaggagggaaactgaggctggggagcagctcagtccggctttcctgtgtagcagcccctgaatctcaggcccgggggtggggcggggtggcgggggggggcgcgcggggcctcccaggggacctgagatcccagccctggactcagctgggagctgggggaagaggcaggtttaacccttcctcttctgggcttctggaactctgggctgccctgggaggcgcggctcccgctgacacagcacgcgtgcccaccccagggacatgagtcacagcaccaggcatggacacatatgctctgtgggtcccggcacacccgagtcacgcacacccagccctgtccccggctgcccccacatccacatccggataagcgcacactttggagtccaagcgcccacctccttgggttgcacacacagcgccacgcagacgggttcctgtgtctttgcacacacgcgggtgccgggggctctgtgcacacacctccaagactgcgtgcacgcccctatatgccctgcgcaccgacgcaggccggcctggggtccctgcactcaccacgccgtgtgcactcgcacatagctacacattcgtgtccacacaagcttgtgtctctgtactctgcccacgggcacacatgtgcgccacacctggcaacccgcacgcccggtctctgcatcccccaccctggctctgggccccgcgtagtggggccagctgggtcggctgcagcctctgccaggacggtcctatttctgcgcccccgcggggcggccgccaggtgcacggtcccggcccccgcctggctaggaggaggcggtaattatgcggccccggggtcccccccacgcgcctttcatcctcggccacgcccgtcgcaggcctagacgctctctaccgcctcccgcccggtcattagtcggggtcgggggaggacctggcgtccggcgggcggggccccgtggggagggcggagtgggcggtgcgggagcgagggagctccgccctcgtctccatggcgacgccccgcaggggaggaggcccgggaggagtatcagggtgcaggaggtgcgcgccccttccgagacggcaggctggaaagggggcggatttgtgaatgggcccacggggcccaagacagacgcgcggggagcaggttcggggactctgactgatccccgcgcctcgccgggcaggggcgagccccgcgcgtcgggcccggaatagcagtctcgcccccgcccggcgcggctattttgagctcctccgttggggccgaggcgcgggggcggcgggaggctgggggtcgacacgcaggctgcgtcctcgccccgcgagattggacccctcgaggactgtgcgctgtggccgcgcagggctgggcggcggggccccctctcccacgcgaggcgtctgcgtggagcggcggcaccgggagcccggccgctcgagccaaacgccgcggacggagcgaggccgcagcgccccctggtgtccgcaacgggcagcgcgtcccggtcgggtcccgcatggtcagtggccagcaggggtggatgaaggggtcccagccgcctgagacccccggtggggacacaggatcgcggtgagatacctgggagtcacgggtgctcgcagacgcagctgaccccagaggcacaggtaccgacacaggtccacacctggaagccggtgcacagtgctcggcacagatgcaaagcggcaggtgtgcgcaggtgcgtgtcaacgccaccctgggaacccaggatggctgcggacactcacggagcccgcacccaggaacccgctcgtagtaagcgcttaataactaggcactggctgaatgaatgaatgaatgaatgaacacggcgcttcgcaaaaccaggaaaaggcagaggctcacagaaccagggaacgatgggctggggggagcggcaagaattacgcaattatgcaggggccgctgtgactaccaggcaccccctccaactccccccctacaagggctgctctgggtcagagaacgtccaccgcgctgactgctggggctgggggctgggggcgcagatcagaaagaatgggcctgaattgctcccaggctgggcatgtggcgcccgcgtctggggctccagtgggtgggtggcccctcccgcatggacggcgggcgcaggggagctcggtgctgatgtctctctcctttaataaccaccctgcgtgagtggctgacgcagcagccggctgccgctgacggggagtggggcggctgtagtgggggggcccgaggtgcagagggggtggtgatgaatcacacagctgctgcctgggggagggggtcttgagcccatgaggggtcccagagaccttgtcactggagacagcgcccctggctacccccacctcgatccacttgagggtggaagtgagtctgaggtcaggagtggggccgggatttccctgggatgagcagcaaagcgggggtctctgtacgccaacttcccccagcttgtcagcagagggtcatccctccgaagactttctggggcagagaggcaggggtccgcgctggcttcttccaccagggctgggggaggcggcggcatgagatgactcctgggcgaggagcaagtggtggccatagagggccccccagaggctttggggccgccgaagagtagtgagtgagggtccttgtaaagctggttctccagatggcggcggctttaagactcccctccgccaaccaggctcagtaggggaggcctgtggaaggagagaaaaggcctgggtggaggagcagagtgggcctggccccgcgtggggagcgagtgcgccgttgctgtgcagcacggtgggaggggaggccgagggccgggcggagtgctggggtgcagtggggactcggggtgtccgcctgcacccgacagcagggacgcacaacactatccggccaggcgagtgtgggggtgtgggccacgcacccagccgtgataatcgcggttccagtgggagttaggcttgggtgcgggttggagtttgtaggcaaactgggttgcgtaaagttggggtgcaccaaagtgtggcgatgtaggaagaattgggattgcgaatattggggttcgcatgaatggggttgtctctgttggggttttggtgggcatggggttgatggcaggaatggagtgctggggtgctgggaaaactgggacgtcggttgtattggcaagaatatcacgacaggtgtcggggttcagatgaagttgggatgtctgacagccgggtcttggttgggtaggggatctgggctaggttgttatgtcgggactgctggagcacaggcaaagtcggggtcccagtgacacccagaagtccccatgaggcctgaggcctgggaatcggggctagaggcccatttgttccccgccgcaggccagggagcaggcacgcgtaactgggtcagccccgccccgccccgccgcgcgctggtcacgccccctcgagcgcgggtggaggactgcggactgcaaacgtctcggccaatagtcgagcccgacaccagtccgcgggagggggcggaaccgagatagactcggcccccagctcatgaatataagacgcaggcgcgccctctgattggcccaggatgtgtagggggcggggcccggcggaagcgtatataaggccgggctcggggacgcccccccctcactcgcgcgttaggaggctcgggtcgttgtggtgcgctgtcttcccgcttgcgtcagggacctgcccgactcagtggtgagggccctggctgcaccggctccgaggagctcggggcggcgggcggcctgcggcggccaggcgaggcggggccgcagcggcacgcccctgggagggggcgggcccggggtggagtccgccccgccggcggcgagggacagcgggagattgggccgagtagcggccagagggcctctccccgccggtccgggccgccggcgacccggttgccgccgcaaaatggcggccgcgagctcgaggctgtgcccagcgaaatggcgggagcgccgagttcccggatggagtggcgcagggtgcgcgcggggcgcatgcgcacgcggcgggggcggggccacgtggcgcccccggtctccagggccgctttcccggccttggggctggaggtatccacacaccaacgcttttgcttaccgagccttagtttcctccttttcccattgcgattgcatgagggaaaggacggcctcgtaaatcttgggtaggcgtggcccgttctagtgtggttcctcgtctgccacgtcgtgctttgcgcccaaagtttggtccaagttggcacagctcccagtgccagacttccaagtctagttctcagagccactgggtggcggccattcccagccagtgaatgctttgtctgtgtcagcactgaccgcccccttaaatagccagttctcctaaatgccacttcccctgcctggaaatcctgccttatcacttccggggccatcccttcccgattcccggcctaggtcctggctatggaagtcagtacctgccctgaggtgccccccaggacggggcggcctccctgacagccagccccccccccagtctcaggaggcattttacagtgagcagaagcacgttctggtccagcaacaagtagatgtcagttggttagggtaggagttggcacccgttcggaaataggagaacctgagagtgcagtcctgcccagggcacaactggaaggctgtgggggaagggagacacccattgtggaaatgggtgcggcctgccttcagtcttgggggtggatggagtaaattatttgaattaagaagtcctaggtggctgggtgcggtggctcacacctgtaatcccaaaactttgggtggccaaggtgggaggattgcttgagcccaggagtttcagaccagcctgggcaacagagcaagaccccatctctactaaaacaaatttaaaaaaattatccaggcgtggtggtgtacacctacagtcccagtttcttgggaggctgaggtaggaggattgcttgagcccaggaggtggaggctgcagtgacccctgcactccagtctgggtgacagttagacacactgcccccgaccccaaaaaaataagtcctaggtatgagtttgagataatgaaaaataaaaatctgattttctaatatttcccctaaaaaacacatgtcatttacataaaataggaagcggggagaggtggtgagagatgacccctgttgaggatttcattggtgtctgccacaggccgccatggcatcagatgaaggcaaactttttgttggagggctgagttttgacaccaatgagcagtcgctggagcaggtcttctcaaagtacggacagatctctgaaggtgaggctgctgctgggcccgcggccctgggcgggggggcttgtgctcctcctacctggaagtacagctgggtgctgactgcagacctctctcccctgcacagtggtggttgtgaaagacagggagacccagagatctcggggatttgggtttgtcacctttgagaacattgacgacgctaaggatgccatgatggccatgaatgggaaggtgaggatcagggtgctgagcaggagtcccgtctcgaggatggggcacccacctgctaacccgtcccgccctctgtctccagtctgtagatggacggcagatccgagtagaccaggcaggcaagtcgtcagacaaccgatcccgtgggtaccgtggtggctctgccgggggccggggcttcttccgtgggggccgaggacggggccgtgggttctctagaggtgagtgccatgagtgggtcccttggggatgctgtgaggtactgctggtgggagctggtactcactttttcctgtatgtgcaggaggaggggaccgaggctatggggggaaccggttcgagtccaggagtgggggctacggaggctccagagactactatagcaggtgagggggaggccggcccaagcacaggggtggttgcgggatggccagcttccgtcccgggtcccaggtccctgggggagctgagatgagactggctgggcaaggagcagaggcaggtggggacccaggccaagaggagaggagactgctcaggacattcgcagaagcgggagggcctgggggacaggctggtggagattttgaacaatttccaagatgctgccctgctggggtccttgttgtgtccccagaagggacggctggcatgggggctggcggctcagcctgttgtggcagagcagaagtagacgggtaccttccggtactcaacgtttgtctgtcttgcagccggagtcagagtggtggctacagtgaccggagctcgggcgggtcctacagagacagttatgacagttacggtaagtcacactccgagggcgccacgctgctgtggcctgcggtgggagctcggttcaccttggtgccctctccaagcactttaggctggacactcagaccttgtcactgtgcttgcccagaagaggcgcatctgtcctctcagagccatttctatcgcaggacgcaaaagccaaatgagactgaccaaaaaggcaagggagagcgagggcccgctgggcagtcagctaggtgcatgtgtggccgcaggccagcctccctcggctgtggggggtggttgctccccggccgcaggccgcgccctggtctggcctctggggtgaagctgcctcttgttgcttcggtgcctttacactgtgcctgcttcttgtcctcagctacacacaacgagtaaaaacccttcctgctcaagatcgtccttccaatggctgtgtgtttaaagattgtgggagcttcgctgaacgttaatgtgtagtaaatgcacctccttgtattcccactttcgtagtcatttcggttctgatcttgtcaaacccagcctgaccgcttctgacgccgggatggcctcgttactagacttttctttttaaggaagtgctgtttttttttgagggttttcaaaacattttgaaaagcatttacttttttgaccacgagccatgagttttcaaaaaaatcgggggttgtgtgggtttttggtttttgttttagtttttggttgcgttgcctttttttttttagtggggttggccccatgaagtgggtgccccactcacttctctgagatcgaacggactgtgaatccgctctttgtcggaagctgagcaagctgtggcttttttccaactccgtgtgacgtttctgagtgtagtgtggtaggaccccggcgggtgtggcagcaactgccctggagccccagcccctgcgtccatctgtgctgtgcgccccacagtagacgtgcagacgtccctgagaggttcttgaagatgtttatttatattgtccttttttactggaagacgtacgcatactccatcgatgttgtatttgcagtggctgaggaattcttgtacgcagttttctttggctttacgaagccgattaaaagaccgtgtgaaatgaaccttgctctgacaattcccttgcattgcaccacacactccttgctgcgggctcctgcagccagacctgagcagagagagaaggtggagaagcagcgggtctgcaagccttccctggggcctgcagagctagaaagggaggcccagcagactggcgctggtcagggtaggggagccaggcgggggacgggagcgggcagctcaggcctcagggcagccctgggaggcttctggcagtggtggccagagggctggactgtgcgggcagcttagcagggacagtggacgtgcacctgacgctgacctggactgcctcagtctagaagcaggccagagagcagaggcacgtggcatcccagggcgacctcagacggccagccggttagctagttctgctgttgcttcacgagttctgagcattctctgctagcctatggaagctgcagccctcggaggacagaagtgttgtgcgcccaacagaaccctctgagacgcaagctgctcccttggctagctcatatgtggaaatagccctgtaattcgaggtaactccttccgctcgtgtccacatccctcttgttgagagctcactgaaagtcatgtgcccggggaatgttcctgtgactgttttttgtttttccttttttttttaactttgtttttgtttttttcaattaagctggaactaaagtcaggcccagccattacgctccccacgtgcagccaggtgcagcctgggcccagtcatgcctggctcatagatgaaatcccttaagcaggattgaagaccagtgaacgcccccgccttttggattttttgctcaattgaccgtcttttccagacctctttaagtcacactcttaacttagctttctctgatgtctgttgccgccattagtttttttctagagcccacactggcccacatagctccatcccatacgggtagctggctccagctgcgccaaggtgcagacccgccctgggcatgctggcctgtgacggagcctgaggtcacagccccctgactagcctgagaccttcctaggggctgtggctgtttccggggaggccgggaggggcagctgtgagccctgtggaggacgttgggagtaacgctgctttgctttggcaggttgaaggggcccggccaggactcggggaagggtggcctgagagcagcgatgacctctggggtcactgtcccaggagggacttcacctggaacaagagctggaggcagccgcttgcccaggaggcttgtcccctgtaagtgctttcgggaagagtggcatgtggcgctgagccctgtcccgggcggcacctgggcgtttcagtgagtcctgctctcccgcacctatggccccatggcgggcgcctttcggtgtgtgttgggtgcagggcagcgcctcccgggagcgccgggtcccccgcctggagcccgcgcctgttctccctcccttcctcctccttccaggaggcgcttcgccagtgaggtgcgggctcagggcctcgagtctctcctggagcacgggctgcggtgcgccggcagcttacggggcggccagtccttgcccacaacgatgtggagccctgtgaaagtcggattcgaataaagggccacgtgtgcacccagaaagccgagtctgtggttcaggggggtctgtcggcggagcggggccactggaagaaaagcctgcggacctcggttcagcgcacgagtaggacccgacagggaagactgcaagggtcattgtccgagcagtgaccgcggggggctcgccactgagggggttcgcagcgcggagactccagtctcgcgggatctgaggcgcactcggcttcgagggagcggcggccgcgcagccgctgtcaggccccgtcttgggccgagtcccgggttccctgtagcaggcttgggagcggggcgccaccttcctgggccctggacgtggccgacgcgttctcagtgtccgtgaggccggggcaggagtggcgggggtcgccccgaagtgggtgggaatgagcggcccgaggtcctgaagtcggggtccgccccgtctccccgctgccagcccgatttcctcggaagccgcgaccccccacgctgggctggcagttctgggctctgccggctgcgccttgccgggactcccacgggcgggctccgggcctccgtcctgatcccttggagcggttcgacgaagcaagttccgcggcgggcgcgcggggcactgtgggtagcgccggggctcaccaggcggaggcggggcccggcgtcaagctccgcctccgcgccccattggctggcatcacctccgcgcgcctgactgacagcgcgcataggggcggggcgccgccaccgcttccgccgggccatggggccgcgcgtgctgcagccgccgctgctgctgctcctgctggcgctgctgctggcggcgctgccgtgcggtgccgaagaggcctcgccgctgcgccccgcgcaggtcacgttgtcgccgccgccggccgtgacgaacgggagccagccgggcgcgccacacaacagcacgcacacgcgtccgccgggggcgtcgggctcggcgctgacgcgctccttctacgtgatcctgggcttctgcggcctgaccgcgctctacttcctgatccgggcgtttaggtgcgtcaggcgcacgtgggcgccgtctctcagccttggccaattagcgcgcgcctagtgcgtcacgtgccgggccgcggggtcctcccctccctccctccctccctccctctctccctgttggagtgggcgtgggcggtgctgtgcggggtcgtcacgtggtgtgggcggtgcaggggccacgggactcacccgctctccagcctgcgcctggggttggaggtgcccagcgcgccgcctcttaactcgggggtgacgctgcccgtttcccaggtggggccactgaagccggagcatgccgggcaggggtcaggccctggcggggcgagggggcctccttggctccttgtcgccggatgcccgtcctcgttctcatcttcccgcctgccgccaggcctttccgtggggtcccgatattttcctttctgcttctacccactgaagctggttcgtcgccagggtcggccacgtgcccgccttgggtgctcccacagcccgggaggtgcagctgcgtccccagaccctcgcgggggtctccagctgtaggcagcccctgggcaggaggggcttctgcgtgttcaggccaccccggcttccctggcctgtggctccagtctcctctgggctcctgactacccagtgtggctgcttctcccgggtgggagagacacagcgaggaccttatccctccccatcaccaccctggcaaagtcaagccgctttttattttttataagtttttattgtagcgatggggtctcgccatgttacccgcgctggtctgaactcctgggctcaagtgatcctttttcgttggcctcccaaagtgctggcattatagatgtgagcacctgcactccgccatgctgctttttatgggccctgtgcagagcctcccctgtgctccacacctcttcctgtggaagcacctgctgcgcgctctcccctgcctgtatgccgcgccctccctgcctcccgggctgctggggccaccaggggcttggccctgagacaggcttccattctgttgtctttggcaaagtctcacccctgtgtgagcctcagtcttttcatcagtgcaatgggagtgacatcagcgtgcctctcctggggtcctggcgcaggggagatgggagggcctggtagggcacatgtcttcttactgtcatcgccatgggagtgaatggtaatcacttggcgattaggacatgaaagaagcaggcacagcaaaaccagggaggtctgcagcagggctcggggctccagtagaggacggcaatgagagtcctgagggaaggaggaggcagggttggcggggaggggccactgactatgcctggacctacttccaggttgaagaagcctcagcggaggcgatacggcctcctcgccaacactgaggaccccacggagatggcctcgctggacagcgacgaggagacggtgtttgagtcccggaatctgagatggtgtgcacccttccccagctctggggcctcggtgggcaggctgggctggagactcagcaggaccctggggacttggccaagccatggagtggtccctgcaatcacagctgacagcggtagtcaggccatggccccactgggcagggctcatcccttctcccagcctccatttacaactttttttttttaaacttaaatgtttgtcatttatttatttttgaggtggagtggcgcgatcccaactcactgcaacctccgcctccgggattgaggcgattttcctgccacagcctcccgagtagctgggattacaggcacccgccaccacgcctcgctaattttttgtatttagtagatagagatggggtttcaccatgttggccaggctgggttccagctccttacctcaggtgatccatctgcctgggcttcccaaagagctgggattacaggtgtgagccaccgcacctgacctaagttttgttttgttttgagatggagtttcgctcttgttgcccaggctggagtgcaatggcacgatctctgctcactgcaacctccacctcccaggttcaagcatttctcccatcgcagcctcctgagtagctgggattaaaggtgctcaccactacacccggctaatttttgtagttttagtagagacagggtttcaccatgttggccaggctggcctcgaactcctgacctcaggtgatctgcccgcttcggcctcccaaagtgctgggattacaggtgtgagccaccgtggtcagccttcttgcttttttaaggcaggaaagcggctgcagggcttagggtagtggttgctccatctgggcccctccctgagggatgaggtctaagtcaggtggagaactgactgcaggatgcttctgagcgggcggggtcagggagggcctctccctggtgtaatggggctggcttctggaagagtgtctcaggccgagggaacagcagggagcggccgggctgcgcagatgccgggcgggactggggtaggcctgggcatcgaggcagctgtcaggggttagcagggttctgggcagggaatgatgggtatgttgcgctgcagtgtggctgctggggggaccttggcctgttggggggtggcaggcatggaggctgggagaccaggagactgggcggcctctggggacagctctgactttttgagcccccagggagggaggcactgggatccctccgcatgctctgactccattctgggaacccctcccaggtttcttctacctcctggctgggggccccttcccccggagtgggcagttgcacagggcccaggaggccggggagggaggccagtggggggaggctgggccctggtagaccgaggggcctggacaggctgcctgcccctgcctgacctgggtgagcctctgcccggcagggcgggcccttcactccttccctctcacccttgaccccctgctttcagatgctgagccagggaggcggcccttccagcagccatgagggaaggacaggagatggggcccaccccagtgcccagcaaccccctgctccaccgctcattcccctgctggccccggggctggtctcacccagtgccaacccgagagctccttttggaacctgcacagcccgccgacctgttgccacctgcacccaccgctggaccatgcagcctcgcctcctggatgctgtcccagcctggccgagggtcccaggtgaagactggagggaccccaacagccaccgcccaggacgctgaggctcccttgcctgactgtgacttgtgcctctctcctgcccccgtggggacatggcagcccagagccaaggctgggtgggcaggtgacccaaggaacctttctgggaacaccttctcgccgggctgggaacaataaatgcagccatgtctctgcagctggtgctgaccccatgccacctctagacccgtgcgtactggtgcagccagtgtgggggtgggtggcggagcagggctcaagccagcctcggttccccatctgcgaccatgcttgggttctccagccttgctcccaagtaaggaacccatcttcagctgcctgggatgaggccctgcctgtcagcatctctcttcctagagagaactcctattcatccgtcaaagcccctgccccagggccccctctatgccatcccttcagcctgggtctcatgggccctgccctggaggatccccacatcaccctcatgaatacctctggcaatgattccagggagccccagagctctgctgcaggaggctggagttccgtgcggcctgggtccccatgccggacactcctcccccatctgcctcctgtgggacttggagcctgagaccccatcccaggcaaggtgcttaatcagcttccctggggccttgttcttcctgcaggggcctgtgtctgggcggagtccagccctggcctgtcatcctgtcccccatgaggttagccttggagagaccatggtgcgtgggtacccatggcctgaggtcccccacaggcaacctgtctggagctgccactgccctgtcacgaggaggagctgccaccaggtggcagccttgagccgcccagtcctctggctgtctccttggtcctaacccttcatgtgggaaagcaagtccagcacagcccatttgtcactccacttcctgaacccaccgtgtcctcacatccactgggggatgggcagtcccccaggtttgcatctcacatacctgccgaccctccctgtctgccgccagggttgggaggggctgtctccactgggggccaggctatcgccccttcagaccagggtcccctgtcctggtactatctgttcccttgggcatgtccgtctgaccaggcctgccaagactctgcttacgtttctccttccccttccagtgccctgggtccttctctgccccagcctcagctgccgcctccaggaagtcctccctgattgcccaccccagcctgttctttaggggaatcctgcagggaaggttggggaagcaacccttaaagtgagggcagagcccgagggaggcccctgagactgcaggtggggagggcagcttggctcagcctggctgtgtgtgggactggggacaagcaagtcacacctatgactcgggctctgctgttccccatctgtctggccgttgcgtctgtctccaaactcccgtttgcatctctccatctgcctccttcactttgtctctgtccgtctctgtctccatgtctgaccctttgggacacacttttaacaggcacggagacaccagccccggcccccaaccctgtgatctgtgccccccgtcccacagctctgagcgctttcaccagcttcaaaaggcacattaattactctaatgaggtcaggagagacccacgctctgccatccggagtcggaacatgccgcagcccccagcccagccgccgccgccccccgctcgagcagggagaggggctctgctgcctccgtcccctctgcctgtcggggcccgtgctgcaccccacgttgctgcagagtaattggcagccccccaaggttaatgcactgttagccaggggttctcctgggctcagagccggagaggggcctgtcagcgagaaatgaaaggccccaggtcccggctggtgctcggcttgtgagcgtgtgtgtgcccgtgggagtgcgtgtgtgtgcgggtgcctgggagcttgcgggggcgggcagtggcttcctccacctctcccacgcagacacgcagacacgcaggcacccacaaaatacagtctcatagacacacggtaagcaactcggacagttccatggatgggacgcccgcagccccgtgggacacgcgatcacacacatgggtgtgacctgctcagctcctaaccccacgccggggagtgtctcagacccatgccccccacccttgcccctcggtgtgcccactggacaagcagcatatcaggtctgtgcctctgggtgggggggggtgggggtctctgcttcagcagcgggccccgcccaggctggagtccagtggactcactgcggggcttctccgcttgtgaaataggggcgggtgggcgctggggacgtggcctcaaaggcgggatgcgttgggttccttgcggcgccggcttgtgcccacagcttggggccgacattcatcctggggagatagagacagggctcctctgccgccctggtgccggggtgccccagggatgtggccccatgtgccaaatcacagtcactcgggttggcaggcgacggagggctctctgcctcttctgggggtgctgagacccctgtaccctcgactccccacctccagggatctcacccccaggtgcccatctcctctgtggggggcctgagccaccactgaccccacattaaggccactgacgtccccgtcctaggccagccagcccctgagaagcacccagtgctttgctgtgggacacaaagccacacatggctattcacgttatttcattaagttacataaaactggaggtccagggcctcagtcaccatggggagaggtcctcagtcgccatggggagaggtccgggtcctcagtcgccgtggggagaggtctggggcctcagtcactgtggtggacagcgattggtgggggcagggacatttcctttgtcttggaaagttctggacgctggtggtgtctggacactggagaacgggtctgtgttcaggccccagacctgaaggtgggatgagggagagaggaaggaggaggaaggggaggagggaggggacagagtgggaaggagaaggatgtgaatggagaggaaggatgggaggaggaaggaaggaaggagggaaggggaggaggaggaaggagaggagggtgcagaggatgggggaaggaggggggaggagggtgtgaaggggaaggagggaggagggagcggaggactgagaaggggaggaaggtgtaaaaggagagggagagaggaaggaagggagggggtattaagggggaagagagtgggaagggggaggagggaggggagggtagtatgaagggggaaggaaggagggaggggagaagggtgggaaggggaggaaggagagagggagggaggggaaggtgtgaagggaaggagggaggggaggtgggagggaagtagggagggggagggaggggaaaggtgtgaagggaaggagggaggggaggagggagggaggagggtgtgaagggaggagggggaggagggtgggaggggaggagggagggaggagggtgtgaaggtgtgaagggaggagggagggaggggaggagggagggaggagggtgtgaagggaggagggagggaggagggtgtgaagggaggagggagggaggggaggagggagggaggagagtgtgaagagaggagaatgggaaggatgggagctggggaggagggaggagggtgagctgggaatggggctgtgtgcctgctcttttccaccactggctgcaggggttgcaggaatcttgggtccatggctggatgggggtggggattttcatgttacccactggagaaagggatacatttttattttcaaggacagcgacccagcccaggggaaacgcccctggcccctggggctaagcgcagaccccagctccgtgcttcgcaggtggggggcgatggacagcggtggggctcccgccctgagtggagcctgtgacctgcccgggccccagcgccccgtgacccctgccgcctgatccttgcctggctgagatggggcttctgaaggctgccggcaccagggcaggcagcgcattgggtccaatttattctgtaatgagaaattctccccgcatatttttagcttcctcctggcgtcgcggcctttgaaggctgaggggctgcgggacgctgatcccaagccctgtggcctggccatgtgggcagtgggtgctgggcacgggctggacaagtcccttcctgagtctgggtagaccccagtcccagcagtgcagagcagggggcggggccagaccccatcaagccctgtactggctccagaccagggactgagggcgaccctggataacccctgaccttggcggacacctgttcccagagtgagcctgatttctgacccttggctccacaggaagcttactctagagtgacctccggccgcggctgcgtcccaaagccgggacagctcccagccccaggagggaacagggcttcttggacccccacagtggcccccctgccaggcaggggtttgccggggcagcctcgcccagggccaggcctcggagacgccctgccctcccctcccttccccaggtccttcctctaggagcggccagcgggcgcggggaggttgaatgggggacgcaccgcctttgttcccgtccctgcttgggctctgaccttgagagagacaagaacagaaggaaaacggagcttctgctcaaatccgttcagcggtggcggtggtggcggctctcgcctcggtggcccctgcatgcaaatgagtggccctgccatgcctgggtggaggtggtgcccttccagctcccacctgtgcaggtcccagtcctggtttgagaagagaccccctcctcccgaccctggcccacccctcctcacccacgagatcccttgaagcaggagggggcttctggtcccagggtagaaggaagcttccagaactcccacctttgccaggtggcatgctggggccgggcacgccaagaccccaggctcacggccccttgtcctgtgcttgggtgcagccgccacactctgctccgaaagtgctcacctccgggagtggccgtccccctccctaaaagagccccccaccagacggagccgcccgggaagcttctccagcctgtctgggctacagagccttgtgtggctagaacccaaggccctcactccaggggtgctgagagagcctgtccagagggcctgcctcagccaccacctgggacaggttcacgccctccactgaagagacacccggccagccctgggccttcgacctgggacgtctgtagtggggtcaggggatgagacctggagctcagaacagacgggctgagctccctggaggagagagaactgagaaccttgtcctggcagggacgctagagcactgggtgggacagacctttctggaagagcaagattttaacaggaagaaaaagtggaaggacttcccagcaggacccagcctgaacaaaggtcaggtggtgtggcccgcgtggcccgctggggaatcgggggaggagggcacgcaggagacacaggacagagcccaccacgtctcagagctgtgggacggtggtgggtccggtccccaccccaccttgctggggcacaggttagcttgcccatctctgggttcacggtccctgccaggagtttgggtaatgcctcacacagggaccttcgggtccaagggctgttggtgcttgccctgcagttccctctcctgcactgggcctggtgaatgacactaattcagagacgtacaacacgatctgggcatcgccagcaaagtccagccagcgtttgatgacagcctaccctccacaagctcagagtctggtgagggaggctgtggcatgaataagggcaaaaacagagggcaggccaggtgcagtggctcacgcctgtaatcctagcactttgggaagcccaggtgggaagatcgcctgagcccaggagttcaagaccagcgtggccaacatggccagacactgtctctatagattggaaaaaagacaaagcagaggccaggcccccagttccccacctgtgtcagcctaccaggaggagaaatcactcggcgttccctgaacagatcagaccccgggtctttgcacaagctgtgcccccgggcagcggccctcccctgcctgcaggattcgtgcgtggagactgatttgctgtcggccggggcttcactctgggcttcttggatcccatccccagctgctcacactccacatcggtccacctactatgctcccggcacccttagggctgaggtgtagggacttactccatccccagggaacagcgtgggtccggagaggcgactcccaggagggccccagggaggtcgcagcccgagcagctttggactttggccagcgcccctctgaaactctgccccggcccccgcagggagactggagttggccgagcccgatttgggacgcgtgcgtcggggttggtgaggctgcggatagcgctggaaccgggcaggtgagaggcccgggacccagggccgggccgggtggagcgcgtgggggcgcgggaggcagggtgcgcccccgcccctcggagaccccaggccgggccacgcggatgccggcggggggcgcgcagaatcggggtcgctgggggcaggccccgggggacgagcctgagacggggtgggccggggcagggggcgggcgcaggctggagacccccgcccagtccccgcgcggccggggcacggcgggagggggcgcccgcggccctcccgacgctcgggcgggacaaaggccggagcccgggcccctccccggcgggtgcggcggcggcggcccgcgctccgacagtccgcgcggccgggtcctgcgcccggggcgaccccggcgccccgccccgccgccgcctgacttctcggcgcccgaggtcgcgcgcgcggaggcgggggcggcccgggatctccaagcgccgccgcgccctcctcccgcccgccctccgcccgcccgctcggcggcggcggcggcggcggaggaggcggagaaggctggcaggcggcggccgggagagcgagcgcggcggccggaccggggccatggcgcccgcgcagcgcccgctgctcccgctgctgctcctgctgttaccgctgccgccgccgcccttcgcgcgcgccgaggacgccgcccgcgccaactcggaccgctacgccgtctactggaaccgcagcaaccccaggtgagcgcggccgcgcgcggggggcgcccggggaccccccaacgccccccaagccgcgcccggcctcgcgcccccggagctccgggcgccccccacgcgcgcgccgccgccgggatgcgggcgcccggttcccgcgggagccccccagggagctccggccccccggagtttgggggactcgcccttttcgcgcctgccttccccggggcgccccattgccctacggactgtggggactcgcgccccacatcccccagagcgccgacgtctcctggagtttggggaacccctctggtaccctccgatgccgggtagcccctgagttgcctgcctggacttggggggacccctgatccacccgcttctctggggagccccctcggtttcgcatttggtggggatccccggggaccttggcaccggaggtgggggactgtggccctcgagggatctctgggttcgtcctgcccgcaggtccccagatgaacttggggaagttggagtgtccctccctcaggacccagcatctgcttcactccagggggccaagggcccagctttgaaaggagactgaggggccggggagctgggggtcagccccgggaggggcagtgggatggagtcctctcttgtcctctgggcgctgaccaggaaactgaggtgcagaggggatgaggagctggctcaaggtcatgcaagggggggacttgggggcaggacccaggtggcccagtgccctgcctgccacgcccggccgagatgccgcacccgcctgctgcaggcccccttgttttgaaccaggtccgggccaggcacaacgtgggggacaggagaagcccccgttggtcagagcaaaaaaagtttgccggggcctggccatggcctggacgtgggtagaaccctctgaaccatcccagggtctccaagacaggagcaggctgcagcttccctgggggtcccgtgggagccggggctttgggggtcctggggctcgggagggagtcagccccagcactcagggtgtcaccgtcttcctaaggcacacggagctgcacatcgggggctgaggcggcccccccccactcttctgctactggtcactttctctccgttttccagccgcttcctgtgccgaccgagccgccctctggagcccgccacccctccttgtcccctctgtctcctgctgtcctcggtccccgggaggaaagttgcatgaaggggtctctttgaggcgggctcggggacaagggcggcccgtgttccgccgtgggggtggggaacacgcacaggcccaccccccaccctggtcaacggcctcgggtcgggccctgggggctgagggcagggaccccgggccgctgggggacggctggcccacctcagagcgggtccccgagccgcccgctgtgctggtcacatgtgggtttgattaaggctgtcgctggccgtgcggggagtccagcgggcagcgcttccccggcccaagtttttggtttcagctgcggaatctcccgtccccagcgtggcctgtcctttgttctagcaaacgccaaacacacgaggacccggcaaccgggggaggaaggtggtcaccagggccgtcctgctgccccacctgccacagggctgtgggctgcgggccggacccccggccaggggaaggaagtggcctccccagtgcctggcttggcccagccacctcctgttgctccgggtctgacctggttgcccagctcaaaccgctgcctgagggaacggccttgctggtccgcagagccgacctgggcagcaccgaggctgcctcctccttcctctcctgcctgcggtatccagggttgctggggacggagccgacaccctgcagtggggcccagggctgggtgagcaccttcccgggaagccgggatccagccagaatcagggctttgtcgcggacatcaggggtctctgcagttctcagatttggtgtccaggggcacctgcccgggacctgtgcctgagtggcgggggtgtcaggcacagcagggggtggtgctgggcctccgtatccaaggggaccctgtggaggggacatcggcttggggagaggagtggcgtcagccggcaggcctaaggtgtgaggctgggctggccggggagggatgatggggtcgggcaggtgtgtgggggatgcggggaccccaagtctttgagaggggcatacagaaaggcactggagacggggacagccgcgatggggggcagacagcagcgtgggcaccaggggaccgtgtgctcgatggggcctgcaggcccgggcagtgccgcagcgtcgccggccgccccttccgcccattggcctggcacctgtgcccaggcgatgactgtgtggtctgtctccacatcacaccctctctgctgtgagaggcgatgcctgcacccaggggaccccgcacccacctccttgggccgctataaggtggggccccgttgggtggtctggctggccggccccgccactcccaccggtgactgcacagcgtccgtccaacccactccccaacctgggctgggtacccctgagctggccgccaggagtctctgggcctgttcccagccgacccgcatcgggctggggcgtccagggcttggacctggccggctgccctcacctgtcctgttggacctggccggctgccctcacctgtcctggccacaacaccgcgtgtgcattcccacggctgctcatgtgtgtttgcgtgcagcggtggggaagggtggcgtgcaggtgtgcctggagtcgcatccggctgcaggttacatgtgtctgtgtgtggcaggaggctgcgtgaatccacagggcacagctctggcgtgtttgcacatgtgtctgcgtgattgcatatgaggtgcatgtgtgtgcatgagtgtgtctgtgcgtggcacccgcgtttgcatgtgcgtgcccttgcacgggatgtctgcagtgtccgaggtccctgtgcgtgtctgcctgtggcatgcatgcgttttgtctgtgcgtggagtgcaggtgtgtgtgcgtgtctgcgtgtggggtgcatgtaagtgtgtctccctgggggcagtgctggctggctgagggcctgcaatgtgggggcagtggtggccccagcacggtccacaatggcaaccccgctgttggccctccctctcctcctcccctggggacgggaccagggcccgtgtgcagacggccatcaagcctcagagcagggtggacgcaggggcctgtggtccccgggagtccccaccttctgattggaaatctgcagccttgggggcactgggtgggcgcttgcccacactgggcatctctgggcttcggccaccctcccggggttccccacggacccagtggccctcgggtgtgggcagcagccgggttcccctcaaacactggatggaaaatggtgacctatgcaagggctcactccccgagggaggagccgtcccccagcagagggcagaggtgaacggggtgtctcgctccccgtggctccgctggcgtccctcggcctctcggggagccggctttgaagggggtgatgccgtgttctgctgcataagggttttttgttttgtttgagagaagctggtccactcggcattgggggcgctaggagagccgggcggtgggcctgggggattcggggcctgagggtggggtcctggaggccgtggggtacctggactcagactcgggagtctgggagacctgggcatgacgtcaggcaggtggcttagcagcctggaacccccaggcctgctctgcgaagtgggggtgacggagccctgcggtgggtgcggctcggccgatagggcctggtgtggatgggcaaaggcctgagggtggtcccaggggttagtgtcccctccccagaagggaaaccgaggcagctcctgtggtggggaggatgcttctgccgaggcaccatggtctctgtgtctcacggtctctttgggtctctgtcttccccatctctgggcatcctggggtgccatgggtggcccaggccttccgcctccactgcaggcctccctgggcggcctcagtttgcagagaagggaacagaggttccgtggcggggggccgtgaacgcagtgggatttgaccttcccccgtctctgggctgacgtctccgcaggtctgcaggggactggccctacgtgggtccctcggggtcacggcggaggcagtgggttgtgcattcatgggggtccgggtggtagcgtttctgtggagccggtggtctccttgtcatccatgagggtcctgccccggtggccgtgtgttccccgggacacggcttctctcctccccaggaaccgggatgcagccaggccttgcccctcagtcctgtgtgtgggaccagcctctcctgcagatgggtcctcagggagagctgggctttgtaccttgctgggggaagggctgagctgctcccgtccctgtgcccaccgtcccgtcgccccagacacgcggctggagcctgcggaggagcagacgagccggcggggtttttgctttaacctcaagcaggcgtttgaactctgtggccgagtcggtcctggtggggggctcgtgccacacctgctcccagaccaggctggtgtggggtctggccgagagactcagcggcgtgtccccccagctctgtgcgccccttgtccacctgccctgtgggtcaggggcccccaattcagggacagagcagccgaggccctgaaagacggtgactcacccaaggccacccggaagttgggcagagtccagggtgtcccacctggggccggcccgggggaagccagggacagccctgggaggggcaggaaggtgggtggccgacggcagctgcactctgtaccagggccacccacgcccacggtgacggaagcccaggtggggctgaccctgcccggcccatctttttcctattttgcttcatttctagggccctgcctcagtttaccctcctgcaccacaaggccatacttgtcctttcttgggcagaccttgcaccatcccggggactgatttcccttcaggtcccacccaggtcctgagcaggaggaaaagctccagtcctcagtcaggggggacatctcttccgtccctggaaaagccaggtgtgggtgctgtcaccccagcaggtcttgctgggggtggcaggaggggacgggcggcctcagccccacgctgggcttcaggacccgggctgcctgctcatccggccagcctgggcctccccgggagcttctccaccctggaagagagatgcagacgggtgcaggcgtccacctgcccacccacggggtcctggctgccggccacaccactgcctcagtttccagtcctggaaggcagcccagcccacccccaccccagttttgggtgagattcctaattagtcgcttagctattagcgtctaataacttgacaattgcccgattggagctaattagctccaggccgcttgctggaagctggtgacagccaggaggcccgggtgggcaggaggggagccctgctgggtgagcctctgcctggggcctggagggctgcctggaggcgtggactttggcacccgcaggttgagtgagtgtggggggaaggtgtggcccggcagagggaacccggaggagtaaaaactgccaccgctgctctgtctgggaaaaatcccaaatcagtcattaaccccttagtgagaatttcagtctctctgccgctccggggaggatttgcatatcgaggcttcatcactaatggaggaagcgaaggctttgtctgcctctccccaggtgcggttttggggtgggggccccctcccccctgcaggcgccaccctcaacaggggcaacgcgcccacctcgggcttgcccgccaacttggaaccgggaatgccaacacagcaaggccgctgctattttagagacgcaaagggaaaaatacggccccactccggcaggcagagccgggggtgggggttcccctgggacctgccctccaacacacacacctgtgggctgctccccacaactctggcattgcaaagtcctcgcctcttgacctttttaattcactcattattgagcaccactgtatgcagggcctgtgtagggccctggggaggggacagaggaggccaacatcaggatccgggattcagacagcaaaccctgtaaagagcagatgtgatatggggcggggcacagggaacagcactgcaggcagtgggaacagcagctgcagaggcccttggtgggaacagggacagccgggaggctggtgtggctggaagggaggagtcttggagagaggaggatgaggagggcgcagtggatgggccacacaggcctggaggggtgtggattttattctgaggatcaggaatggatggagggctctgagccgccgccaacgtgttacagggtctgttttgcagaagagcgaggcttgggatatggggaggctgggccccggcagaccctcaccgcagcctggaggggcccgggcacctggccgctcagccacacagaagcctcggtctctgacattttaccgaaggcagaacaggaggagagaacacagtggtgtcagacgtgggggaaggaggcaccattggggaaccaagaggccagagggggacctacagggctggtgctgtgggcactttcagaggctgctctgtctcaagaagtgtcctgctaggagccaggttctttttttgggttgaatgtggctccctggggatcactgccgggacaggaggggaaactgaggccagagggcagtggggagcccagacgcccctgtggtccctccacggaggcctcccctgcagggtgacctgggtgtgggcagtcccaggcgggagctgggccttggctaccatcgaccgcctgatcaatgggctttcacttgggctgggcaggaacgaaaatgacttttcaaaaaggctggagcagcttctgcatcgatcgtgcccaaggggccagcgggtcaatgagatgcctgtgcccggccggccaatggggcagcctgaggggtgggctgaggccgagcccatctccatctgagcctgtatgggggctgcccccgtgtctgtgcggacgcaccccgagtgtccaacagccgggaggaccatccccttgcacggaggggaaagggagcctctgagaggaggccggacctcgagacccaagggttcaaatccagacgcaagcccagaactgcaagattccgaagccccggaagggcccctgccctccaggcctggtgcccgggggagatttccctgcaacacgccctcccatgtcccctgtgctgggctcacaggggtgatgaaggaggcctgggaagctctctgtccctggacgaatccaaccaggtagggaagggctggagggtgacttcaccgcctccgccgccctgccttgaaattctttgctctggagatcttcatgccggatccctagtggggaaactgaggcgcaagtgagcacacctgtctgccccttctcacccctggagacccaggaacccccggccccgcctggcgtggcatctcagggtggcggggggccgggctgatgccatctgataatcccaccaccctctctctcgagctgctgtgccaattagtgcccccagtgtggggcctgcggcgggctcacccctgcaggccggggtggcggtggctgtgccgggctagaggcagtgccagggccgggatcgtagcagcctgcacccatgtgctgccaacactggtggggcctcagtttcccctgcctgtgcatggagggaggaggcaggagcggtgtgggggaccccccattcctccctgttcaggtcttttatgtgctaataagcccctctcagggcccccctcgtgccccgcttggtccaggccgccggttacatgacaggggccctggggaccacagccgggagatctaagggctcctgccgccatcgcccgaggcagtgagggaaggggagccgccggtcccttcctcggctgatctctatcctcacagacgaggctgggtcagggggctccctggaggaaggggcctgtgggttgcgtctgggggacctcagggcaaaggcctggaggcagggctgggggctgaggtgtcaggagtgcaggcacccaagagggagaccaggaggccgccggattccggggctcggggctcgggaggtttctgggttccagatgtgagagggtggtatggggctcgcagggtcacacaggaaggcaggggtggggctgggagtggagcccaggatgtctccgagctgggcggcaggtggaactcggcaggctgagagagagggggcggtgggcggaactctgggggtgctgagaggagggtggagggattcttcacgccaagctccgttctctttggggaaactgaggccagggtgggggcagagcttgccccagagcgagctggaatgcccgacctgtgtcccccacgctgccccggtccttctcaacaggtgggagtgcagaatgaaagcagggctgggggctgcctggaggaggcggcacagatgttaagcatgttaggtagatgcgaagtttctggagagggaattcttgtggagggacagctcgtgcagaggcccggagtcaggaaccccccgccggccctttgcacacaggggtccagatgtcacccacctggacacccacctcgctgctggccctgccgtggggctgttggggacactgaggcaggaggtggggggcagtgccaggcaagagatcgtgggctcccaaccttggaagcccgccgtgattggggtgtgcaaccccacctgctgaccgctatcaccattcagggcccaggcggagtccaccttgtgaactgacccctcccccattccccggcctgacttccccgtgcacctgtcccctgacccgtccctccccgctcaccctgtcccgtgccctgtgcacctgtccccggagccatctctccccgcgcacactgacccgtgccccatgcacctgtcccctgaccctgtcccccctggcgcaccctgacccgtcccccgtgctcctgaccccggccctcgccgcgcaccccgacccgtccctcgtgctcctgtcccctgaccctggccctccccgcgcaccccgacccgtgccccgttcctcgctccgggcgctgacctctggccgccttgtccccgcaggttccacgcaggcgcgggggacgacggcgggggctacacggtggaggtgagcatcaatgactacctggacatctactgcccgcactatggggcgccgctgccgccggccgagcgcatggagcactacgtgctgtacatggtcaacggcgagggccacgcctcctgcgaccaccgccagcgcggcttcaagcgctgggagtgcaaccggcccgcggcgcccggggggccgctcaagttctcggagaagttccagctcttcacgcccttctccctgggcttcgagttccggcccggccacgagtattactacatctgtgagtggggtcgggccggggctgccggggcccgagtgggcggggacgcgggggcggggccaggaagtgggcgggaccactggggtggggccggggagtgggcggggcagcgcagtgggcggggccgcggtgtggggccaggggggagtgggcggggccgcggaatggggccaggggggagtgggcggggccgcggagtggggccagggccggtgctggccactgacccaccccggtcactgaccccctccagatgtcaagtgcatgatggacgtgccattctcccaaccatcccgggaggccaggactttcctcgtccttcgttgcatatggggaaactgaggcttggagggggactgaggctgcactattgtgatctcgggcctccagctcagaccacttggtggttgggccagtagacctggctcagccccccgatagcgagaccagggtgcccgagccccagcacactgatgagggaaactgaggcatccggagcccagcaggggaggggagcttggtggaagccacagctaggctgagtgctggggcttactcctgcaatcccagcactttgggatgccgaggcgggaggatcacttgaggccagcgtggacaacgtagggagaccttctctctacaaaaacataaaaacaattagccaggtgtggtggcatgggcctgtggtcccagctgtgcagggggctgaggtgggagggctgcttggagtgcatgagctctggtcgctccactgcactccagcctgggtggcagagcgagaccctgtctttaaaagaagaaaaaaaccccacagggcccctgccgcaccagccgcacccagactgggtaggggtctccaggtcctccctgccccgcacccacccccgcatctccccgggacccatgccaggctcggagactccctgaggaccgtggggtcttcatctgaaggttgggtggcggcagccttggggatagtcacatctgcaggaccccatggtgggccaggctgggtgggccaggctgagggaggctgccagtccctgctgcttatcggaggtccgaagctggcctttttgtccctacgaaaggccaacggcaggtggggaacacagcagcgccagccggagtcccagtcctgcttggccatgatatctgtgaccttggcgggggaatgaggggccaggcactgcccacctgagatggggatgatggcatcacactcgtggcttccgccgtggcgctgagactgagggattctcgtggagtggggaccccggcttctcagcatctcggggcctgagggatggggagtcagggatctggggtctgtgcccccaggctgcaggggggccagtgcctggacacccagctcctgctgtgtgaaattaaactttacaaggccccattgcctcctttctctgctctagttggatttttcccttttaattcagggaagaagcgggtgggggacgggggaaggtgtttaaattaagtccccataatatgagaaaaattacatttttctttctgagacggcagtttcataaagataattattgtaattattcgtcctacctctgtgatgaatgttatttttattacatgctttttatcttcatcttccagtgtgaggggtttctagggggcgggcagaggtggtggccatgagagccaggccatcaggggcccagggcccggcagagacagcaagaccacatccatgtgtgcgtgcacatggacccacccctgttcgattgtccacacgtgtgcacaccccagcggccccggcttcaggcgtccttttcctcctctcttgatccttgcagacgcccccactgcactccaggatgcttctgggggcccgaaagcaggggcggtgatgctgg[156 bp omitted]tctactaaaaatacaaaaattagccaggcatggtggcacacatttgtaatcctgtttacttgggaggctgaggcaggagaattgcttgaacccgggaggctgagattgcagtgagccgagatcgtaccattgcactccagcctgggcgacaagagcaaagctccatcacaaaaaaaaaaaaaaaaaaaaaaaaaaagaatctttcccagagaatctactgtgttgccaggcgaggtccagagagggagcggcttgtccacaggctctcagaggcagagatttgaacccaggtcaatcatttcactattaatatatcacctctttgctgattgcttgaaaacaaatacatcattttccgagctcaccctgtgctgccctggggtgaggcagagcagaacaaaaacacagacacccccaggttctggggtcaggattggacagaaggaggagcagggggaatgtgcaggagactgctgggaaacagggggcattgtgtctggggctttgatgtacgattaggagttttaagggtggctctccacctggggtcagggttgattcaccaaggtggggaagggagtacagccccaggaggtctcaggcaccaagaggcacttccccactcatccccatcccctctcttctagctgccacgcctcccaatgctgtggaccggccctgcctgcgactgaaggtgtacgtgcggccgaccagtaagtgctcagggggatgggcaggatccaggcccccacccctgtgtcctaaacccacagaaccagtgagtgttcagaagagccaggacagggggcctcgggtttccctatcttgccctgccttgccccagcctcgatttccccgtctgatgaacatgtcagaccttcgagagtgaaggttagctgagcgcagtggctcacgcctataatcccagcacattgggatgctgaggtgggagaatcaattgagcccaggaggccgaggctgcagtgagcagagatcacgccactgcattccagcctgggtgacagagcaagactctgtctctaaaaaacaaagcaggccggttgggtggctcacgcctgtaatcccaactttgggagcctgaggcaggtggatcacctgaggtcaggagtttgagaccagcctggttaacatggcgaaaccccatctctactaaaaatacaaaatttagccgggcctggtggcgggctcctgtaatcccagctactcaggagactgaggcaggagaatcacttgaacccgggaagtggaggttgcagtgagcccagattgcgccactgctctccagtctgggtgatatagcaagactgcgtctaaaaaataaaataaaataaaaataaaaataaaaacagagtggccgggcacggtggctcacacctgtaatcccagcactttgggaggctgaggtgggtggaccccaaggtcaagagatggagaccgtcctggccaacatggtgaaaccccgtctctgctgaaaatacaaaattagccgggcgtggtggcacatgcctgtagtcccagctatttgggaggctgaagctggagaatcgcctgaacccgggaggcggaggttgcagtgagcccagattgcgccactgcacgccagcctggcgacggtgagactccgtctcaaaaaataaataaataaataaaaataaagcaaaaaaaaaaaaaaaaagattaaaagagtgaaggttgaattcaacagccaggtcccccacttcaggccaagtgactttgcccggagagtgggcatcggggatggcaccaagagggagcagagggcctgcctggtggggtgatgagcccgttgggcagatgtgcaccctgagggcgggcggcacgtggggagcccagtggggttcgggcggccgctgagcgtgctgtctctgccacccgcagacgagaccctgtacgaggctcctgagcccatcttcaccagcaataactcgtgtagcagcccgggcggctgccgcctcttcctcagcaccatccccgtgctctggaccctcctgggttcctagtcccagccccgcaggacgccgaccctgcctggacggccccgcctggaccgcctgacctcggccctccggacccggctgcggcccccgcctccgagaccaaatagagacgctgcttctccctcgcctggtgccgcccccgccgggcaggggccatccacccgccccaggaccagccctcagggaggggaaacggccgagagcccccccccggaggcccgaggggccggggtgtggatgcggaccgtggccaggccatctcctctggggcgtcggagaacccgggaacctcttggcgatttttttttttttttttttttttttttttttttttagtgtatttttcgtggttggatcaaaaagacttgagtttttaatttaatttattccctgccgttgtagcggggcggggtccctgtgccctggcctgggggaggggaacgcggaacatggggtcgggaacacagccgctcccctctgctctgcaccccactcgtgggggaacacagccgctcccctctgctctgcaccccactcgtgggggaacacagccgctcccctctgctctgcaccccactcgtgggggaacacagccgctcccctctgctctgcaccccactcgtgggggaacacagctgcagcccaccgcggacccccctggtgctccaggttgggtgagtctgagccggaaggggtacgtggtgggcgcccctcattgtggctggggagacctcataccccatcgcccacccccgtcctcctggtcatttcctcccagacactgttttgccccagcgcccttcggaatcacagtcccgccgtgtcttagaaactgctttggccgatgcaaacagccccctacccgtccccctcgcctcacacggtccctctccgaggccgagaagaccttctgttcctgtaaatacagccagcaagtgcaaactgtgattttattttccacgtattcctgaggacggactggaccgtctatgttttttcagcccttcatagggggtcttttattttggtgggggggtggggtggacttttagagtagaagctgcacttggcaataagctcgtgtcgtctgtcagagcccctctctcaactctgtgacctgataatgtttctaagaaaaagaaaaaaaggacaaaagggagggaaccactaccaaaaaaaaaaaaagaaactcctccccgaagacactttaatgaaggaaacaacacatttatacggatttcatatttctacccgcctttcctgactctgtgttttatatatattatatataaatatatattgtgtacggccgccggccggcggctcgaggcacgcccggtggtggggggtgggcagagggcttttgtagggggtcggcggggcgggccgcgttgccaggcctggagctggcgaccgggcctccctcttcccgtcacaatcaactttggattctgtatttttttataataaaatgagcataaacctcaaacgcgtgtgtctgtatgtgggggccttgccctacttgaaggagacttttgcattcctaatttggcggtggatgctgggcgtggtggtttactcctgtgattgcagcactttgggaggccgaggcgggcagatcgcttgaggtcaggagtttgaaaccagtctggccaacatggtgaaaccccatctctactaaaaatatgaaaaaaaaaaaaaaaaaagccaggtgaggtggtgcacgcctgtcatcccagctactcgggaggctgaggcaggagaacctcttgaacccgggagttggaggttgcagtgagctgagatcgtgcctttgccctccagcctcggcaacagagcgaaactctgtctcaaaaaggaaaaaaaaaattagctcggcgtggtggtgcacaactgtagacccagctactcgggaggctgaggtgagaggatggcttgagcccggcaggtggaggctacagggagctatgatcacaccactgcactccagcttgggcaacaaagcaagaccctgcctcaaataatagtaatagtaataataataataataatttagaggtgggtctggaatctactggggagaggggtgcggcttcgaggaacctctggggatccccagagctgtgaacctgactgattctttggttctgtgcatcgttttggggtcagaccttgggatgagcattttatagggcccgtatccttcatagccatccatgggcttcagtttccctctctgggaagtagcaacagcccacctagggctgggagggggcagctgggaggatggagggaggagacggggcctgtgcatggctggccctggggacaccgctggccggcacacacctgaacatggtggaattcctgggcctcaggatccaatcaaatgttgtgaaatctccactggcaagctctgcctctgtgtaactcagtttccccacctgctccaggccagggcaggggctctgtcatctcctaacctcttccccttgcaaacggcacatctgtaagttctcgggtcccaggggccttcatgccaggcacgccccgattgaagaaactgaggcacagagaggctgggggtgacgcggcaggtgacccggcccaggggactgaggtctttacggctggacgatggtcgcctgcatcccacccgccgtgacgacggcgtctccggcacaattagccgagcgggaacgctcccagctaattaattcagctgcgctgggcccggtgacgggggccgcctcctaatgaggcagcccaggcacaaagacccctgtgtgtgccccgccccgcccctgcccagcgcggggtggacgcacggaggcacagagggccggccggccaccgtgctgagcaccgcgggggaggctccaccatgccccactccacagaggaccccgaggctcagagagggaggcgacccccacagcccattcatgccgagacccccaccccaaactgcaacgtgaccactgggacagagaggaccaaggacagaatgagatcagggatcatgagaggcatcccagtgctgactgtgatgctgttacaaaaacacaatagtgtccttccctccattttaagtacaattgcatggattttagtgcattgagacttgtgcagccatcagctctgattccagaacattccatcaccccaaaaggaagccttgtccccatcagccgtcactccttatcccctcccctggcaccaacgtatcccctccttccctgtctctgtggatgggcctgtcctggacgtttcatggaaatgggtcacacactgtgtggccttgcgtgtctggcatctctcactgagtgtgacgtcctcaaggtgcatctgcgctgtggcctgggtcagagcctcgctccttttcacagctgagcacgttccggtgcgtggaaggaccacgctgtgtttatccaatcatctatccaggggcacttgggtactttccaccttttagctattatgacaattgttaaaaatacaatttattattattattgttttttgtagagatggggtcttgctatatttcctggctggtctcgaactcctgggctcaagtgatcctcccgccctggcctcccagagtgctgggggtgccaggcatggtagctcacccctgtaatctcaccattttcagagattgtctctaaaaaacaaagaacaaaaactcacaagccaaacttcttgtgattacagaagtgagccaccacgcccagccaagatgctttttttagatttattatttaactctgtattatttattagagacggggtctcactctgtcgcccaggctggagtgcagtggtgcgatcacggctcactgaaacctctggctcctgggctcaagcgatttgcctcccgcagcctctgagtagctggcactacgggcatattgtgacaatcttattatttttgagacaaagtttcaatgcaaaaggtgactttgctttttcgtttttgtttttgtgtttttttgagactgagtctctctgtcacccaggctggagtgtaatggcacgaacccggctcactgcagcctccgcctcccacgttcaagcaattctcctgcctcagattcccgagaagctgggattacaggtgtgtgccaactcgcccagctaatttttgtatttttagtagagatggggtttcaccatattggccaggctggtctcaaattcctgacctgaagtaatccacctgccttggcctccgaaagtgctgagaatacagacgtgagccactgcgcccagcctaaaaggtgactttgggtaaatacacaaagaatggctgagctcctgcctctgggcctttgcatgcactgtccccccagcccaccccactgccccgatgaacctctcttgcagattgcagccaggctcccccactcagccccttccaactcagctcagatgtcacctgagctcctggccaggaggctgtgggtgccctttgtgactgtttacttacctgactcctccccaggctgcagccgctaagggcagggctgggtctgtcctggttatcgccgggaccagtgctgggcccagagcagggaatctcctgggaccgtgtcattggccacacgcagacacgtgtacacacacacacgcgtagccctgcgcttgcacctccatgcctgtgtacccctgtgtcgccagacacatgtgttttgggcccgagcctctcaggaactgacctccactcccgcgccagaccctgaccagaccctggtgcctgtcccagtggctgcatcaacgtgtcgagtggccactcactccaggggctgtgctgggatgtccccgccgggtgtgggcgctccttggggaacctggttacccccgaccccagccccagtgagaccccaatgccggctcctgccagccctggacggccattggtacgctggtcccgcgcagagtcttttccgcccagaggatcctgagggaagtcatctccctcctgccggccagttactgccgcctcggtgcccgccgcgggcagggggcagcgggaggctgctaggggaaaggaggcctgaggcgcccaaaactcttgagtgcggcttggggtggaacgtgccgccccccacagccccggtggcccagggcagggctctgcatccccccagacctcaccactgagcctcagtgtgcctgtctacatctgtgtttgaggagaaaaccccttggtccccaccctctggtccaaacagccatgatggaggggggctcactttttttttgctttttagaaatggtgtctcattcttcaccctcaaaactgaacggaggctgggcatggtggctcctgcctgtaatcccagcaattttggagactgaggcaggctgattgctggaggccaggggttcaagaccagcctgggcaacagggtgagacccccaccaccaccatctcggcaaaataaaaattaaaaaattagccaggcatgctggcacgcacctctggttccagctactcgggaggcccagggggaaagatgctttgagcccaggaggttgagactgcattgagccatgatcacgccactgcactccagcctgggtgacagagccagaccctgtctcaaaaaacaaacaaacaaaaatactgaacagctcacaccagtaatcccagcactttgggaggccaaggcaggtagctcacttgaggtcaggagttcgagaccagcttggccaacatggtgaaaccttgtctctactaaaaatacaaaaattagccggccgtgatggcaggcgcctgtagtcccagctactcgggaaggctgaaacacaagaatcgccttgcagggatccaacagccacatggcagtaatgagaggctccagaaaagaaaagaaaacaaaacaaaacaaaaataagaaaaacaaacaaaataaggagaagaaaaaaaaaagaagcccccccccccaccatccccagaggccacagcactctgtcctctggtcccccaacccagccctgacacctgcttcttccccagggcacctctcactcacgggtgttccctctttgccctggctggcacacccttcccgagtctcctctgggctctccccacctttttttttttttttttttttttgagatgaaatttcgctcttgccgcccaggctggagtgcagtggggcgatctcggctcactgcaagctccgcctcccgggttcacaccattctcctgcctc[133 bp omitted]ctcgcctcccaaagtactgggattacaggcatgagccaccgcgcccggcctatttattttattttatttttttgagacagagtctcactctgtcgcccaggctggagtgcagtggcacgatctcagctaactgcaagctccgtctcccgggttcacgccattctcctgcctcagcctcccgagtggctgggactacaggcacccgccaccacgcccgctgttttttttttgtatttttagtagagaccgggtttcactgtgttagccaggatggtcttgatctcctgacctcgtgatctgcctgcctcggcctcccaaagtgctgggatgacaggcgtgagccaccgcgcccggccactggggccactttctatcaaccacacctggctcgggcatgcacctgccctcccccatgcatacaggcccacatccatgccttcaaatggccacaaaagtgtgcgtggccatagacatacatacttgcaagtgtttctctttttgttttttgttttttgttttttttgagacggagtcttgctctgtcacccaggctggagtgcaatggcacaatcgcagctcactgcaacctccgcctcctgggttcaactgattctcctgcctcagcctcctgagtagctgggattacaggtgcgtgccaccacacctggctaatttttgtatttttagtagagacagggtttcaccatgttggtcaggctggtctcaaacccctgacctcgtgatcctcccgcctcagcctcccaaagtgctgggatgacaggcgtgagccaccgcgcccggccttttttttttttttttttggacgcagtctcactctgtcgcccacgagtacagtggcgtgatctcagctcactgcaacctccgcctcccgggttcaagcgtttctcctgcctcagcttcccgagtggctgggactacaggcacgtaccaccacgacccgctttttttttttttttttttttgtatttttagtagagacgggttttctc[131 bp omitted]accgtgctacccaccatcgcgggcaggagaagcacgtcccgcgggtgcgtcttcaccacttccggcttctccgtgggcggcgcccccttcttggccttgcgcaggcgcttgagcagcgagcgctgcttccgccacaggcccgggttcagccgccgccggcgcgcgctgttcagctgcatccgctgctccgaggacatgtccagtagctggtccaggtccacgccgcgctgggtgaagttgcggaaggtctgtttcttctgctgctgtacctctgccgtcttgctgcatcctcagaatagctctccaggcccttctttatgagacagggtcttgcctttgttgcccaggctggaatgcagtggtgtgatcatggctcactgcagtcttgacttcttgggctcaagggatcctcctgcctcagcctcccgagtagctcgaaccacaggtgcacaccaccatacctggctaatttttgattatttgtagagatggggtcttgctacggtgcccaggctgatctcaaactcctgggcccaagggatcctcttgcctcggcctcctaaaatgctgggatcacaggcgtgggtcaccgtgcccggcaagctctgggtcctcctgcacggtcgcctggtggagcagaaaccaccgccagcggctccccgtctatttgtctgtgcacattcctgggctcagacggtggcttccgaggccggaacttcggagtcacctgctccgcacttgagtctggaacgtctcagaccggacccctccctttacagcctgagagagggagagaccctgcccaggcctcccaggggcctgcccacccgacagctcctgactcccccaccctcattggtccagaaatggaaggcttcggcccaggagcgatcaatgcaccctaatggacatgtgtcggggggggggggaggggcgctgagtcgcaggagacacccttccctgtgcagagggggaaactgaggccactcccaggccccatgggtcactggcccgaagcagtgtgagccctgccgggtcaggggttgcatctggagcagcccagggagaatgaggctggggacccttcattccgggggtcattagggacaccccaccaggctgtgtgtgcccagggtggtctcttccccagctccgactgccccgccgggttttggggcttacggttctgtcctgggctcaagtcctggctcccaccaggcactgtggggcatcccctctgggtctggggtccacagtgcctgtctccaggcgtgagagaagcttctagagacaatctgtgagcatctttcccatccctgcctctccccagctcaagctccgaagggaacgtggatggcaggagagaggagggaggcgtggggcgagtttatctctcactggctttctccgcccccacctggcctcccctggggcttctgtgattctttgttttttttttgaggcagggtgtttctctgtcccccaggctggagtgcaatggtgctatcgtggctcactgcagcctccacctcctaggctcaagcaatcctcccacctcagcctctcgcgagtggctgggaccacaggcacgcggctccatgctagctaattttttttattttttgtagagatgaggtctcgctgtgttgcccagactggtcttgaactcctggcctctggtgatccttccacctcagcctcttgggtagttgagactgcaggcatgagccaccacacgtggctaatttttgtttatttatttatttatttttgtagagatggggtttcaccatgttgcccagactggtttcccaactcctgagctcaagggatcctcccgccttggcctcccaaagtgctgggattacaggcatgagcccagtctgagacccactttgtagataaggaagatgaggtcagagaaggggagtgcccaggccctgggccccacagccgggacccctttagggtccagtggatggcgaaggggaggcggcctgaccactaccgactccagccagtcgccccagcctccagggagagcagcacaggtgcccagagaagcgacgaatctggatatttcttccccacatgaggaggagctgggggcacctgagtgggtggtctcggtgctgggcggtcctcatggccccctaagcgtcgaaaaccagagcttgttatgatcttgtgatgggaagggggcccgcctctcgcagggaccgctgtcggccccctctgcccgcccaccaggcgctagagttatggtttgcaatatcccatgcccctcccagcctgagcattaatgacggtggtatccgagtccccgagcacccggggctgttattaacatcgtccatcacgcttgtggctgcggctctagaagctctttggctaggaggggaaactgaggcaccgagaggttcgccttgacccctgcgtgagggcacagctgcagacatcggataagcccaggttccagtgccctctccaccacccgctgtgggtgaggcccctgttctctgagcctcagtttgctcatctggaaaacaggctagtgacacagggtggggtctcagatcctgggggctcttgatgagcagaatcgccaggcccatggaggcaggccctttgttgcctgatctccccgccttccctgtgatcccattgtctggcacaatgccagcaagccctcctcggatgtttgttgaatgactgaatgagcgtgttgtgtgtggactctgagtcaagtgctctttcttgccaactgggaaagactggaggcaaagggctcattctccatcattcactcctccaggaaggcctagggggcaggggtggtggtggggaacggcctctcgcaggtgaggggggcagcgggggaaccgcgggagtcagccgtgctggctggcagatctttaaattaaaatgcatatatacaccagataaataaactcggcccacatcctggtgacaggcagaattaagttgcccagttggggaccgggcagcgaaggctgggggtggaaggggatggggccgaattaccaagggcggcgactcagctccatcctctgccacattgtatcccatgaacgttcctgagacccctgtcctgccgggtctctgggaagcgctgagggggtcagggagtaaggacccaaattctgagccccaagttgggcacccaggatctggcccggcttagagagagaccagctgcccacggggtgccctgggtgagtcagtgtcttcgtctgaaacagggagaccatggccccccgtcccagcacagaggctgcccttggcagtgggcatggggcggacctggttcaagtcccggctgagcactcaagggctgggagcagcctccgtcgggtcaggtaccagggagaccccgttctagctcccagggaggcccccgtggggcccgcacagctgcagggtcctccctgggcccttccctctgacccaagcccaggggagaggggcggagggggcggcgggcagttttcaattacggagcagctaatctcccagtgagggccgttctggggcccagtaaatctattatgaaaagcctctaaatgtatgtaaaaccggcctccgacaatccggggattaggccgccgggaggggaaaccgaggcgcaggccgcctggcggattagcgcagcggggcccctggagggttggggggagcagtccccagaggtccagggcagagggagaggggtcctctgaagaagccagcacccattttatagctggggaaactgaggccggggaagggccccccccccccccccaccaggggtcccctctcagcgtcaagggcacttttgccagccgctcctgcctttgtcgcaaacccaggggtattttcccacaaggtggactcggtgggtttgaaagatggggagctggggacccctggacccggcttaaggctccgtggcccggcccgcatctcctgccgccgtcgcaggccctttgaagctgccccatcctttggtgcttttgaaatgtctttattaatcacctaccgtttgccaagccagaggtggcaaaggtaacaggagacgggagcccagtgccctggcagctcagggcactcgccaaagacgaaggcagccgggagaggccttccccaaggactcccgcttccgctgggaggtggggaggaggaggtcaccccacagaagtgcggtgaggccactgcaggcgcgagggaaggcctggtggccgaagggaggcgtgagctgagaagccccgtgcctgggctgctcctgagggtggcagggagccctcggagggcttgaacctaagtggcccctgcagcatccatggcgggaccgtggacctccaagcccgcctccctcggaagcacagcttcctcagcgtggccccacactctcccaggctcacccagccccctcgcatagggcctgctcaccctcctgcctgtggggcccttggtccagcagtttcctctcctgcacactgtccccacctgctgaagtccgtccaggagcccaggtgcatgatgggagggggtgatgcccctcctcacccccacctagtggagtttgcaggcagctctgcagatcgcctggcagctggagaaactgaggcataaggctgggcgtggtggctcacgcccgtaatcccagcactttgggaggacgaggctggtggatcacctgaggtcaggagtttgagaccagcctggctaacatggtggaaccccgtctctactaaaactacaaaaattagccgggcgtagtggcacgcacctgtaatctcaactactcgggaggctgaggcaggagaattgcttgaacccgggaggtggaggttgcagtgagccgagattgtgccattgcactccagtgtgggtgacaagagcgaaactccgtctcaaaaaaaaaaaaagaaaaaattgaggcatgagctgacagctgtttctgcaggcctcaggcagcacccgatggggccttcccagggcccctggcctggcccggctccagccaccagcttgtccctgcctcccaggtgctggggaatgaaagggaggcgagtgatttctctgactccttcaggcccaggcctccgaattcctccaactcccaggtgaggggttgtgcaaagctgcagcagggtgggaccgtcccagtgagggtgattctggagtcggccatggtgggcctgctctgtgacctgggagggggtgtgtgcctgtctgtgactcagtttcctcgtccgtgtcatcagcaacggccaaatgccgttcccagcactggatgggggtggagggcctgaggggtgtgggtgggggggagctccaggcgcccctgccccccgcccagccgtcagtcaggctggccgggcccccttcaagtcgtcacggcccagcagcggccacgggagggattattccggcctgtccagggtggactgaagtggaaccaaggctgacgagcggaacgcgcccccatggacccagcccgcccgcctttgtccgccgccagccccccacccgcctgccgtcacagaccccgcctcccgtgcctgagccccatttctctgggggccgggctgcctcgcgtggcccccgcctgactaaagccatgcagcttctcggccggctccatccgctggctgcctcagtttccccctctgcagcatgggcatacagggttcctctcgtcggctcattggctgctgaatgggggctgtgtgggcagaggctctcccggggctttcccagggtgctcgggggtccctctgcccggtccctccactgtgcctttgtccaggaaattcgaggtggcagggagaacggatccgctctcggcctgaacggagccgcggcaaatgctgttgacccctgaccccggccccctaatcccggggttgaggctctcaccggagaggggccctgggagatgagctggggcacgacccccgccccgggcaccgaggggggcttccaggtcagggtcggagaggcttcgggaggacgcggctgccccattggccacgtgcccggtcatcacctctcggaggccaacacgggaaactgaggcgtggaggagccctcctaagccccacagctctgggatgggagccaggcctagccacctgcagggagagagacacggccggcagctgcccctccctgagtcaccaaacaggaattccgggacgtctggctggccctggaaggcacggctagcttacaaacccccagtcttcaggaacctctctgggtacctggcccctgtgttccccggggaggccccaggatccccttgtctggaacagggggaggggcctttctggccaccctctgctgctctacatttacccagtgtcttcaggaggaagaaatgaatgaatgaatgaagtggaaggtgtcctcatgcctgccagctgctgcagtctagcccccgtgccttgtggctacttagaggcctcagctagcagcatccaccgcagattaaaagattctccgtcggaggctgggatgcgctcacacgcttgggcgcccctgcgctccccggtggccgtgtgtctgttccaccctgccgagctgttccccacgatcaatttcaatttggcctggtctctgcctctgcagcacgaccctccttgggggccgacggcggggaaggagttgctggcttccgcagctctccccccaggtccctgggaccctcgcctggtgaagagagagctctgctgggccgcctctttttccgggcctcagtttctctgggtttggaatgagggcacagggcagcgcagtgtggacccagcctggttttcatccaacctcatgaagtcactgaatgctcgccgtgggcctgaccctgggctgaaccctggggcaccgtgggggctacggcaggcaaacgagtcggaggcagaggaagggcgttcctgcaggggggaggctgtgtgcagaggggtagagggagggaggcaggagggagcgtcctggaagaaacagttaaggtggggccacagaggagggtggacaagcctaggcaacaatattcctcaacagccgaagtttgtgtatttgttttttgagacagagtctcactttgtcactcaggctggagtgcagtgagctgaggtgcgatctcagctcactgcagcctcaacctccctggctcaatcgatcctcccatctcagcctcccaagtaactgggaccacagttgtgtgccaccacgcccagctaatgtatttatttatttatttatttagagacagaatcgctctgtcgcccaggctggagtacaggggtgcaatctcggctcactgcaacctccacctcctgggttcgagtgcttctcctgcctcagcctcctgagtagctgggattacaggtgcaccccaccatgcctggcttatttatttgtttattatttatttatttttgagacagtcttgctctgtcactcaggctggagtgcagtaatgcgatctcagctcactgcaacctcgacctccctggctcaagtgagcctcccatctcagcctcccaagtaactgggaccacaggtgtgcaccaccacgcccggctaatttatttatttgtttatttagagacagagtcttgttctgtcgcccaggctggagtgcagtggtgcaatctcggctcactgcaacctccacttcctgggttcaagtgattctcctgcctcagcctcccgaggagctgggattacaggcacctgccaccacgcccggctaaattttgtaattttagtaga[144 bp omitted]gtgtaccaaacgtcagccgacaggctttccctgcctcatctccctgcaacctcccaaggatcctctaatacccattttacaaatgaggagacaggccacagacagaggccgctgtgaggtgagggaaggaggccacggccatgctggcattggcagcactggtccagctcagacctgtccaggtccccagcaggactgcggtgcgcctggctccttcctctgcgcgctccattcccttgctgcttccttccgggcctccaggcttccctccttttctagggtggcggtggaggaacctatatgggctcctgggtgctggagttcgatctgaaccttcccgctcattctgcgtgaccttgggggcgtgcctggccctcccgtgcctcagtttccccagccgcacctgccggactgtgaggccccgaccccccgccctctctggcccccccgcggctccgggctcaggccgccgctaggtggagcgaggaggccggtggagacgcggtgcggggagacgcgcgctcgggagctgcagaggccggggagcgggcctggcgcgcgggtagagctgcgtggacgcccgcggcccttggcgctcagagctcccgccccgcagccagcgcctctaggaggcccagccggacagtctgcgaggggcgcgctccgggcgcaggaggggcggtgtccggggcgcgtggtttgggtcgtcgggacctggatcccggagcaggcaggctgaggtctgcatggtcagggcggcctcaggtgctggggagccaccctggctggacctagggtcccagcttcacgttcacctcctggagcctcaggtctgggtctgatgccccaacgggaaccccaagccctgcccaccgcccgtcctcacctctgctgccccttcactgccccgaccagtggcttccgccataaccctcttgggagacccatttttcataggaggaaactgaggcacagagcgttttctcggtcacagaacagctggatccctcctgtgtgatgagcacctctgggtcctcctgtgtcgtgaccacacctgtgtccactttctgggtcctgggctgcagaatgtcaccgccccaaataccctctcgtgggtgctgtggttggtttccttggccttgggagggtcctttctactcaggtagggataccgtctgggttccccccctactgcccctgcaaggcagggctggtgatccgtgtgcaccctgggggccgtctcatgtgtggctgcaccttcccacaccacggctgaggagaggatcctacccacaggtgcccctggtgggttcagccggcccctgccgcgggatcctgcttgatttctggtactccaggcctcgccactgtcattcccgctgggcatgatgcgcacctgctgtgccatgctcttgggcagctctctggggtcacggaaacttctgtgcctcagttgcctcctctggaatgtgcaaatccttcgagaaataagctggaagacctgggagcaagcaggcttgggtttccaggtttggggggggggtgcccagatacaaccccaaggctttgggaggtgaggggacaccctgctgctccatctggacccgcgcccgtgagctctgctgctctgcgcctgacccacagctctgtccacttgccccatatggg[138 bp omitted]cgtagtgaaacctcatctctactgaaaatgcaaaaattagccaggtgtgatggtgtgggcctgtaatcccagctactcaggaggctgaggtagaagaattgcttgaacctgagagagggaggttgcattgagccgagatatcgtgccactgcactttagcctgggggatagagtgggagggatcgatccagccctctttcatccccttcccgctcactccgacccaacctcccagttctgtctttaaaacaagctgcttttgtctctgccccagggcctttgcacgggctgctccatccctgcatgtggccagcccagcagctccctcactgcccacctgtggccggctgcatccctccaatcttcagacacccatttttttttctttttcttttctgttttattttttttgagatggtgggggtggtctcggtatgttgcccaggctggtctccaactcctgagctcaagtgatcctcccacctcggtctcccaaagtgctgggatcacaggcatgagccacctcgcctggtcttgacacttattttcatgttcagtttgaccatatttgtgacaagtcagagacgatacagcaaggggaagaagacacgttcccttccctctagaaagtcacagtcacgcacagaaggcagaaggcttgcagtgcacagcgacgggataaaggaaccagctctgcaacagagtgagtggctctgagcttttgatcattgagatataattcacagaccatgaggttcacctgcttaaagcactgagctataactcgcggaccatgaggttcacctgcttaaaggtgtaatccagtggcttttagcgtacttgcagagttgtgcaaacctcacctctctctagttccagaacgttctcatcaccccagaaggaaaccccatccccattagccattgctccccatccccaccccagccctggcacccaggcatcccctctctgcctctgtgggttggcctgtcctggacacttcatagaaatgagatcacagactgggtgtggtggctcacatgcctgtactcccagcactttgggaggccg[132 bp omitted]ggctgaggcagggagaattgcttgaacctgggaggcagaggtttcagtgagccaagattgtgctgctgctgtccagcatgggcaacagagcaagactctgtctcaaaaaaaaaaaagaaaactgaaactcagacagcgaccctcctctgcctcagtcctgcggtggctccatgtgccccaggattaacgcacactccccggcctggcggcacactttgctgggcacggggcgagaccagaagaacccaaagaggccagagggtcccagctcagcgaggagtgggaggtgcttccttctacccagataagagcctgggagagctgggagagtgggaagtggggtcgccccgattttccagggcaggaaaccaaggctggggccttgggctaacacccacgtcaggccccgggtctcgctgcccagaggctccggtgagtgaagctcctggcagcgtgcacctgcgcccgccggacccgcctcccacctgccattcctgccggggagggaagggccactgtgggcggctcagggcccccaccgctgtttccgggctcttggtggggtggggagggccgctgtcagagaccccctgagaccctcgggaacactgcctgcctaatgaggatccctggggcctctgcccagttcgggccggggaataaaggcctcctcttccattccgctgtttctccgccccccgccgtaataggattgagacttttgaagttaataggaaatgaggcaggctcccacgtacagaatgcggacgcggagggcttagagggccctttgtgagcccggccgggcggctccccccgccggccggccgtgatgaaagcaccgtgaaatatacagtggcaggacgccccttgaccctgacaggcctcttaaagaaaagaaggggggaaaatcccccagcagttgtacatgtgcatgtgaacacacgtgtgtgtgtatgcagcgctctggcccggccggccactgggacgctgtctgcacggcgcccacgcggggcctcggctcagcca[131 bp omitted]tcactgcaacctccgcctcccaggttcaagctattctcctgcctcagccttcctgagtagctgggattataggcatgcgccaccatgcccggctaattttgtgtttttagtagagatggggtttctccatgttagtcaggctggtctcgaactcccgacctcagatgatccgcctgcctcggcctcccaaagcgccgggattacaggcatgagccaccgtgcccggcctgtttgttttttttttgagatggagtctctgtcacccaggctggaatgtagtggcgcaatccctgctcactgccacctctgcctcccaggttcaagcgattctcctgcctcagcctcccaagtagagtagctgggattacaggcacctgtcaccatacccagctaattttttttttttgtattttagtagagacggggttttgccatgttggccaggctggtctcgaactcctgacctcaagtgatccacccaccttggcctcccaaagtgctgggattacaggctcgagccactgcgcccagctgagtttggggttttggatgctgggcctgagagtcagaggccattcatcactcagggcagacagccccacccaaggctcggtcttctctactaacacacctccagagacggcaggcttaccacttagcaagactcctagacaaggcttctttgcgtgtggctccagaggaaggtgaagatgacacctttcaatgtcactaaggaaaagtgacaagggacagaagggaaggcaattttttttttttgagacatggtctcactcccattgcccaagctggagttcagtggttctgtatcacctcattgcagcctccacctcctgggctcaagtgatcctcccatctcattttttcatttttttgtagagatagggtctcactacattgcccagactggtctcgaactcctgggcttaagggatcctcccacctcagcctcccaaaatgttgggattacaggcgtgagccaccgctcctgcctcagcctccacagtagctgggattacaggtgcctgccaccatgcccagctaatttttgtatttttggtagagacagggtttcatcatgttggccaggctggtctcaaattcctgacctcaggtgatctgcccgcctcagcctcccaaagtgctgggattacaggtgtgagccactgcgcccggcccaagaaggcaatttctaaaacagctttattgagttattcacatagcatacagttcattcatttaaagtatacaatttttttttctttgtatttttagtaga[244 bp omitted]tgcctcagtctcctgagtagctgggactacaggcgccttccaccacgcctggctattttttttttttttttttttaattagagacagggtttcacggtgttagccaggatggtctcaatctcctgacctcgtgatccacccacctcggtcggcctcccaaagtgctgggattataggtgtgagccaccgtgccctgccttgatttcttttattgtcttcataaagctgtgtgtccatcaacccaatcaactttagaacatttccatcattccaaaaggaaaccccgttccctccccagccctggcacccacacttcccctccctgtctctgtggatctgcctgccctggacatttcatagaaatgggattgcacacctgtggccttctgtgtctggcgtctctcactgagtgtggcgtcctcaggatgcatctgcgctgtggcctgggtcagagcctcgctccttttcacggctcagtcgtgttccagtgggcagagggccatgccgtgtttgcccattcttgtgttgatggacatttgggctgtttcagacgtttctgagtgtgtagggaatgctgttcttgccaactcttccagtggccctggatttgggcctttgaccctcacagaaggccaagcagaggctgggcaggtcccaccaaggccagaagcagagggcgtgttccccagcagggcctggtgtttggagcatgacacatggaaacagcttccaggcatgaccctgtgtctcccagctggccctgccacttctggaggtgaccctgccaccctgtgactctgtttctccgtcggcaaaggcggcggtgatggggactctgtggtggcagctattgtcaggcagcatggcagctgcacacgggggctcgcccatgtgagggaggctttccgcaggtggtccctgtccctgtccctgttcgcatggtcctgcagacggccgtctcacccccataccactggcgttggagggcagattgggcgtgaggagagggtgaatctgtgtccagggctccccagttttccgttcagacccgtggggaggcgactttcccgctgtgggctccagcatcgggaggggtggtctgtgtggagtgacgtgtggccctgtccccgctacgagaaatcccggggaaaggaggggtgaagggggcgggagggggttcctggaatctggctgagcttgggtggcacccaaggatgcctgcagcccgcccagtggcacgggaagccccctcacccgctggctggaaggggtgggaggcaagtggcaggaggcaggtggatgggttgcctgttcttccctgggggcgccaggggaagacctgtccctgccagagcaccgcggctggcagcccccagccctttggtggcagctatgccctggggtgggcagggtgatgcgtaggtcatctgcccctgtggtgggcccagcgccctcctgtcttctcagaccctccagaggaggcaaaggaggtctctcaggcagagcgagaacatgtcattccttcagggacagcagaaccaccacaggtactgcccacctgggtcagacatcagagggacagagacagagagacagagacagtcagagacagagagacaaagggagacagagagagacagacgcaggcagacagagtcagagatggagggaggaagagacggagagacagtgacagagacagaaggagacagagacagagagacagagacagagggagacagagagacagagatgggggagacagacaaaaacagagagacaaagacagagacagagggaaacagagagagggagagacagaaatagagataaacagagacagagagggaaggagacagagaaagagacagagagacagagggagacagagatagatcgagtcggacagagacagagaaagagacacagagagacagagggatacagagatacagcaagtcggagagagacagagagacatggggagacagaggcagcgcaggggcggctgtgcagggcgatgggccgagggctccatcccggccttcctggcccctgggccccccgcctcccagctgtgactggcctgctctggccttgggctccgcctgacttttctgggtttggggttgagggtgcaggaggccctggcagggcaggactctgggtccccaggggccgcctcaccatcctgcccccggggtcacagaacttgggcatctccccatcagtgggcgacacgggcccagcagggactcgggaaggggctggggcaccctgggctctgctcagcccgtgtcccaggagcttggcaaggggcgcacagccagcccacagctaactgctgaggggaaccctcctctcccaggtgccagcccaggtgggggcagggagcctcaggccctaccctcgggtgctcacagcgtctcctggacttagcagaggtcggtgaggcccgaggaagcttcatgctggggtctcggtgcaggaggtggaggggggatgggaaaaggcttgaagggagggcccggatccatcaatggacactgaggctgcttggtgtctcctggaagatctgttcacatcctggcccct[145 bp omitted]aaccccgtctctatgaaaaatacaaaaacaaaattagccgggcgtggtggcggcaggcgcctgtagtcccagctactcgggaggctgaggcaggagaatggtgtgaacccggaaggcggcgcttgcagtgagccgagatcgcgccaccgcactccaacctgggcgacacagcgacactccgtctcaaaaaaaaaaaaaaaaaaatagggccttggcagatgtgaccgagttatgacgaggtcgttcgagtgggcctggcgcagcgtgactggcatccatataaaatacacatgcattgattgggcactggtgaaagggaactacctcagtccccacctcaggatgtcgcataaccggtgtttatggcaccaaaaacttcatctctgtaaaccacttggaggggtgtctggcaccaagtccatgtccatgagtgtctgaaaatagcataaaaataaaatagaaaaaaagaaagagctggtgcctaccctcggggagcctacaggacgtgagcttgaaagagctggttatctccccgtctctctgtctctctctgtcttggaaatgtctaagggggcaggcaggagggcttcctggaggaggggtcctttgagctgagttcagaagggcgagaaggagccaggtttctcatggagcagccaatgcaaagggctgggggccacctggagcctggtgtgtccttcgggcagctggtgtggctggagcaggggatgccaagcctgctgagggcttcatgggccgcagggaggagtttggtttttctcctgagggcactggggagccacagcagagtttagagcagaagaaggacacaatttgtgccctgtgcccgtggtgagcggcgagcagggagggctgcctggaggcgggtaaggacctcagagcggaattctgccacagtgaagctttggaggaaatctttcttccttttctcttcttttcccatcacgggttgagaaattggagggaggggcattgctggggcttcctgtgcccgcgtgtgcggggggttctggggcctgctgcctgcctgagccagccccttttcccgccagaggcctctcgtcagtccccgggggggcccagtggtgaccttgggcctcggggaacatccagacctgggtcagtggcctcggcaagtgcccgggggatccgccctccggtccccgtgccagtttccacagcgggacaggggggtcccgggggccgggagtccgcagccccgaagacctacgctgccgccagccacacccctgggggtccgaccctcctgggtcccactttacagatggaggaactgaggcggtgactctaatcttcgcccggcctgagtcgcggggctggaacccgcagcgtttgccgattcccagggcccgagcgctccggcgagtgtgtgtgtaacgccctctccctggacgcctcgagtttaggaaacggcggagccgcccggattgaaattctcggcccgtgcacgcccggcggagaaatccatgacgcattgtttagacagacgcctttaaaccgcgccgcggcggggggcggcggccgggggcgcctgcgcggggaaggtcaccctttttttctgcacaaaggtcagccgtagaccgttgccaagacaacggccggcgtaaagatggaggcttaaggagaacagacagttcccctcccgaagatgccccgtgcaaagggcccggccgtgggcttgggaggctcagggggtgtgaggagctgagcgccggagcagagagagcggagagtggggcgctgggatggctctgggaggccaggaaggaatgcgggggcctggggggcagatcttggctcaggccctgccaggctgtcttcaaaccaatgagcctcagggttcctggctgtgaaatgggaacaacgtctgcccttcagggtaggcatctccaggctggtctggtgtgggaaccgctgtgttaaacatgcagactccagccaggcgccgtggctcacaccaacggggcacagtggctcacaccaacagggcacagtagctcacacccgccgggcacggtggttcacaccagccgggcacggtggctcacacccgccgggcacagtggttcacgccagccaggcacagtggctcaaacccgctgggcacagtggctcacaccaacggggcacagtggctcacacccgccgggcacggtggttcacaccagccgggcacggtggctcacaccagccgggcacagtggctcacacccgccgggcacagtggttcacaccagccgggcacagtggctcaaacccgctgggcacagtggctcacaccaacagggcacagtggcccacgccagccgggcacggtggctcacgctaacagggcagagtggttcacgctagccgggcatggtggcagtatgccagccgggtacagtggctcacgcttgtcatctcagcactttggtgtttgtttgtttgtttgtttttgagatagtctcactctgtcgcccaggctggactgtagtgacaagatctgggctcattgcaacctccgcctcccgggttcaagcgattctactgcctcagcctcccaagtagctgggactacaggcatgtgccatcacgcctagctaattttttgtacttttagtagagacgcggttgcaccattttggccaggctggtcttgaactcctgacctcgttatccacccgcctcggcctcccgaagtgctgggattacaagtgtgagccaccgcgcccagcctcatctcagcactttaggaggctgaggcgggaggactgcttgagtccaggagtttaagacgagctgggcaacatagtgcaatcctgtctttattttaaaaaatacaaaaaaattagctgtgcatggtggtgtgcatgtgcagtccagtcccacgtactcaagaggctgaggtgggaggatcttgggagcccaggaggtcacagctgcagtgagccatgattatgtcactgcactccagcctgggtgacagagcaagaccctgtctcaaaaaggcagattcggccgggtgcggtggctcacgcctggaatcccagcacttcgggaggccgaggtgggcggatcaccaggtcaggagatcgagaccatcctggctaacacggtgaaaccccgtctctactaaaaataaaaaaatcagccgggcgtggtggtgggcgcctgtagtcccagctacttgggaggctgagacaggagaatggcgtgaacccgggaggtggagcttgcagcgagccgagattctgccactgcactccagcctgggtgacagagcgagactccgtctcaaaaaaaaaaaaaaaaaatgctgattcataggccctccagggggctcgggctccagaaaggctgggggtcttggtcagcatcctaggtgtcccctgatcaccgccagaggtcccatgagtgtgagctgggactccgaggaggcttggtttctcctacccccttccccgagctggagccggaagcccagtggcccctctgggccggaagcagactggaggctcagatttgcaaacctgagaacagaggtcccgggagcaatgaggtgggcctgagaccctcgctcagaggtggctgcttctcgatctgcaggatctgagggccttggcggccagcagggacgtggccaggagctggcctcggctttggggactcaaggtctttgctgtcatagctttttggtagctacataaaaatggtgctgttcacacaaaccaatctccctggaggtgcttttaaggactgatgagagccacacgccctgattaccatttcatttaccggcgaacctgccttacctttgcgacagagaggacatcaggaaggtgacttttattgaggtgaaattcacacgatgcaaaagtaaccattttaaagtaaacttaatgacctgcgtcagcctcactcccattccctgccccagccctgacgctacgcaaccactttcttcttttatttatttatttatttattttttgagacagagtctttctctgtaacccaggctggagtgcagtggcacgatctcagctcactgcaacctccaccttccggattcaagcaattctcctgcctcagcctcccgagtagctgggactacaggtgcccgccaccacacccggctattttgtatctttagtagagacggggtttcaccgtgttggccaggctggtctccaacgcctgacctcaagttatccacccaccttggcctcctgaagtgttgagattacaggcgtgagccacctcacccagccgagcagtttttaatttttggaaaatgtgtacctccactgtgagaggcgtctgtgtgtgcgtgttgtggtttgagtgccctgaattagttaaaggcactccttcttctctgcggttccctgcagacctgaccgtctgtgattctgcagatgtcagggctgtacagaagagggtggaggccgggccagccccagctcctgctcacacagggaattagtgtcagagctgggctggggtcgagaggtgggctgctgggacatccgccctttcacccccatgctgactccaacatcagattgctgtcagcctggctgtccgaaaaagaacggacctggggccgggcgcagtggctcacgcctgtaatcccagctactcaaaaggctgaggcagaagaatcgcttgaaccagggaggcggaggttgcagtgagccgacatcgtgccactgcattccagccggggtgacagagtgagaccccatctcaaaaaagaaaaagaaaaaaaaaaagggccgggcgcagtggctcatgcctgtaatcccagcactttgggaggccaagaccggctgatcacgaggtcaggagatcgaggccatcctggctaacacagtaaaacctcgtccctactaaaaataaaaaaaattagccaggcgtggtcgagggcacctgtagtcccagctactcgggaggctgaggcagaatggtgtgaacccaggaggcggagcttgcagtgagccgagatcgtgccactgcactctagcctgggcgacagagcgagactccgtctcaaaacaaacaaacaaacaaacaaaaagactgggcacggtggctcaggcctgtaatcccagcactttgggaggccaaggctggcagatcacctgaggtcaggagtttgagaccagcctggccaacccaattttttttctctactgaaaaaaaaaaaaaaaaaaatatatatatatatatataggaggctgaggcaggagaatcgcttgaatcaggaggcagaggttgtagtgagccgagattgtgccactgcactccatcgtgggcaagagagggagactctgtctcaaaaaaaacaaacctagaaaaattagctgggcatggtggtgggcacctgtaatcccagctacttgggaggc[136 bp omitted]ttctcgccaattaggacaggacatcgggaacctagaaaatttgaccaacacggaaaagcaccccaaaccaaaccacacagcaacagcaaaactcagactcttagcacctccacccagaaccagtactgtttatacgattccagtcacgacccggcatgtgtcgggtgtggacgcatacgcatgcacctgcttttctcaaagagtgatgttttagctgctaatttgtacctatttatcacttaacactgcattaatatcactgctcttttcccatgtaaactagtcttctgggacagaatttgtttttatttttattacaaaaattttttttgagacagaggctctatcgtccaggctggaatgcagtggcatgatcgcatctcactgcaacctctgtctcccaggttcaaacgattctcctacctcagcctcccgagtagctgggattacaggtgcataccacccccccactaatttttgtacatttactagagacaaggtttcaccatgttggacaggctggtctcgaactcctgacctcaggtgatccacgcaccttggcctcccaaagggctgggattacaggcatgaactaccgtgcccagccttatttttactttcagagatgggagtctcactgtgttgcccaggttggcctcaaactcccgggctcaagtgatcctcctgcctcggcttcccaaagtgctgggattacaggcgtgagtcactgcgcccggccctgaagtttttttttttttttttttttgagacggagtcttgctcttttgcccaggctggagtgcagtggtgcgatctcggctcactgcaagctccacctcctgggtttacgccattctcctgcctcagcctcccgagtagctgggactacaggcgtccgccaccgtgcccagctaa[143 bp omitted]tttttaatctttggcttctcgcaaggtgctgcttccttttaccttctagaatgttctccgccacaaaaaagattaaagtctccaacaacaaaacaaaacaaaaaacacttccaaactgcaactcattgagagatggcagaggcttgtttcagattccagttgggaaggggaggtagggtgggtgcttctccgagaaagcccctggtgtgggggaggtgggctgaggttggagagggggtacccacagcggccaggtgggaagaagcctgcctgggagccgaggtctccacgtggccgccatggactgggggtcactctgcgcctgagatgtcttcagagactccagctataaaaagctgtgtggggctgggcgtggtggctcacagccacctgtaatcctggaactttgggaggctgaggtgggcggatcatgaggtcaggagtttgagaccatcctggccaacatgctgaaaccctttctctactaaaaatacaaaaaatagccgggcacggtggctcacgcctgtaatcccagccctttgggaggccgagatgggcagatcacctgaggtcaggagttcgggaccagcctgaccaacatggaaaaaccccgtctctactaaaaatacaaaattggccgggtgcggtggctcacacctgtaatcccagcactttgggaggctgaggtgggcggatcacgaggtcaggagttcgagaccatcctcgccaacatggtgaaaccctgtctctacaaaaaatacaaaaaatggctgggcgcagtg[131 bp omitted]gtggtgggcagctgtagtcccagctactcgggagcctgagg[134 bp omitted]cctccggggcacgctgggcctccggagtctggagtgggggctaggggctgcctggggaggggctggaagggaagcagcagacaatgggctgggctgcacccctcccccggttccagttccccccaaatcagacggacacggctgcagaaagctgcggcctctcacgcggccaggcgcggggcgcacaatgcttgctgtcgtcccgtgttttctgctgtccccgcctccgttgtctgggtcccctggggcagctgtggaaattgggggttgagagcccttccaggcaggctatctttgtggctgtttcaagcatcctttgggagacagtaggggacaccttcccttccgccctctggacgaggcaggggtgacagcgtcggtgcgtgtactgggctctcgggaaggaggagggggcccggctcctggtcccttgtcccttgtccctgctcagtcctggttgcaggcattgtgggcaccacccgtgctgcccacaggaagatcattgtccgtagcagcatcctgagctgtgacctgcgtttatttccccatggggacgtggggtctccctgatgtcaagagaggcggtgtcacacaggcatttaacatgccactgccatgattgggactgggattgggaccagcacagccccttgggggatgtggcggtgtggtgggagaggggcttgggaacccaccagcagcctagccctggaagctgcgtgttgtagattatggaaaatgctgcagcactcagaacgagacatctgaaaatggtgttgaaagaaaacaaggacctgtcacttctgtgaatgtccccagcaaggactctcaggctatgatgagttggtttttttttttttttttttttttgagatggaatcttgctctgtcgccgtggctggagtgcagtggtgcaatctcggctcatcgcaacctctgcctctcgggttcaagtgattctcccacctcatcctcctgagtagctggaattacaggcacctgccaccacgcccagctaatttttatatttttagtagaaacagggtttcaccatc[137 bp omitted]ttttattatttatttatttattattattttttttttagatggagtctcactctgtcacccaggccggaatgcagtggcacgatcttggctcactgcaacctccaacttctaggttcaagtgattctcctgcctc[133 bp omitted]cagcctcccaaagtgctgggattacaggtgtgagccaccacgcccagcctcaaaaaaaaatttttcaaattaaatttaaaaaaaaacaaacccagtctgggcacggtggctcacacctataatcctagtagtttgggaagctgaggcaggtggatcacttgaggtcaggagtttgagaccagcctgggcaacacagaaaaaccccatctctacaaaaaagaaaacatgagctgggtgtgatggtccacgcctctaatcccagctacttggtaggctgacgtgggaggatcacttgagcccaggaggttgaggctgcagtgagccatgattttgccactgcactccagcctaggcaacggagcaagactctgcctgaaaaaaaaaaaggatttgtctgtgtctacgcgcgtgtgtgttttgctcttgttgcccaggctggagtgcagtggcgcaatctcggctcactgcaacctccggctcccaagttcaagtgattttcctgcctcagcctcctgagtagctgggattacagacatgcgccaccacgcccggtaatttttgtatttttagtacagacagggtttctccatgttggccagggtggtctggaactcccaacctcaggtgatccgcccacctcggcctcccaaagtgttgggattacaggggcatgagccacggtgcccagccacatttatgtatttattaaataaaatagctgggcaccgtggctcgtgcctgtaatcccggcactttgggaggcccagatcagcagcgctttgcacgttgtgcctgttggcctcggtttccccggtaaaacttgtgatggttgcatgaagcccagatccatgaataaaacacgaggtctggagttagtgcttcctctcctacagcgaatgcataatcagcccacaactgcggcgacgaggcgtccgaggcggccgcaccccagcagcgatcggtgattcatggctcgatctgctaattgcctctcgggccggcttcgggctgatgcgtttgacaaggcgaggaggctgagacgtgcattaggcactcagccgcccccgccgcccatggagggcgcgactgctgctccctcttgggggtgatccgtcatttcatccacgggggagttggggacctggggggcaagagagaggctggatgcctgggccctgtttgtaaacagcgttgatttctgagctgagatgtggcgaccaggcccggagcagggctgtattcacagtcgtcgaggggtctgccggccgtggccctgctatggaaccttgggtggggctggggaacaggacc[174 bp omitted]gtggcgggcgcctgtagtcccagctactctggaggctgaggcaggagaatggcgtgaacccgggaggcggagcttgcagtgagccgagatcacgccactgcactccagcctgggggacagagcgagactccgtctcaaaaaaaaacaacaacaaaaaaagacaggccctcctgccaaggagaacgccagctgccggccgcagtcatttgtctgtcacttggatgcatgcagagcggggtctccggagggtggctggtgccggaacctgctgccacttacagggccctggtccccgtggatgctccagcttctccttagagctcccggctaagatggacccgcaagtgtgttttgttgttgttgctatttttggagacggagtttcactctgtcgcccaggatggagtgcggtggcgtgatcttggcccactgcaacctccatctcccgggttcaagcaattctcctgcctcagcgacctgagtagctgggattacaggcatgcgccgccaccgcacccagctaatttttgtattttttaatagagacggggtttcacctgttggccaggctggtctgaaactcctgacctcaggtgatctgcctgccttggcctcccaaagtgctgggattacaggcataatttttgtattttttagtagagatggggtttcaccatgttggccaggctggtctcgaactcctgacctcaggtgatctgcctgccttggcctcccaaagtgctgagattacaggcataatttttgtattttttagtagagatggggtttcaccatgttggccaggctggtctcgaactcctgacctcaggtgatgtgccagcctcggcctcccacactgttaggatcgcaggtggatcgcagagtcttgctctgttgctcaggctggagtgcagtggcaaaatcatggcttactgagccaccgcgcccggcttgtcccgtattcttattgctacgtccggcagcgctgtctggacaggcctaggacctgctatctccttgggtcaggctcaggcctctttgtccacttctgagctcctcctggcacgtactctgtggaatgaagcctggagcagctctaatttttttttttttttttttttttgagacggagtcttgctctgtcacccaggctggagttcagtggcgcagtctcagctcactgcaagctccgcctcccaggttcacgccattctcctgcctcagcctcccgagtagctgggattacaggcacccgccaccacacctggctaattttttgtatttttttagtagagacggggtttcaccatgttagccaggatggtctcaatctcctgatctcgtgatccaccctcctcggcctcccaaagtgctgggattataggcgtgtgccaccgcacccggccctggagcagctcttgaggtgtgttggccccttgggcccactggccctgggtcaccttgggtgtccacccacagtggtgcagcaggaggccattctcagcaagacccgctctcatcccagcgtcgctcaacagctgctgagaacgccctctgctcccggtgggagaaggggctggtggcacctgaggaccctggcccgagggagccctggagatgctgtgggttcccacatctagggatgctggtaaagctttgcacaggcctggcaaggaggaagcggactcctcaccctgccgggcactaggcaggtccccaaatagcatcagagaaacctgcttccccaaacgaacactgagtgaagccgtcatttgcccggaggtgaaaatgtaaatggtttcaaaatagatttggggccagcgtgggcgacagacacagacaggcacacacatgggctacccgggctggggtgcgatgacgccgttgcccctggttacagaaaggcaaccccccagctcagcacaggccgggggccaccacccaaacacggtcaccagcagcggcaggagggaagcaaggagaccaccttttcccggggccaggagaccaggtcatgcctccaaaggctccagcttgggctacctgtgccattagcgagtgcctctcagctgccccccgggagtcagcaggctgactgccccacggcggaggaatggcggggctgtttaaagcactctgtggaacttttcttcttcttcctattattatttatttattttatttttcagatgaagtctcgctccgtcgcccagaccggagtgcagtggcgggatcttggctcactgcaacctccacctcctgggttcgagcaattctcctgcttcagcctcccaagtagctgggattacaggcgcgcgccaccacacccatctaatttttgtgtttttagtagagacgggtttcaccatgttggccaggctggtctcgaactcctgacgtcaagtgatccgcccacctcggcctcccaaagtgctgggagtacaggcgtgagacaccggacctggcccttcttctttctattattaatagactttatcttatttttattatttatttattattttccttttctttttgagacagggtctcactctgtcacccaggctggagtacagtagaacaatcttggctcactgcaacctcgacctcctggggctcaagtgatcctccagtctcagcctcccgagtagctgggattacaggcgcctgacaccacacctggctaatttttgtgtttttagtagagatggggtttcgccatgttggccaggctagtctcgaactcctgagctcaggcgatccacccacctcggcctcccaaagtgctgggattccaggcatgcactattatgactggttactttgactttttcttaaaaatggggtctcaccatattgcccaggctagactcaaattcctgggcttgaccgtggttggtgactttcgcctttaatgtgaacactttgggaggcagaggtgggaagagtgcttgaggccaggagttcaagaacagcctgggtaacattgtgagaccccccatctcaatttttattaaaaagaaggaaaacaaaaaaattaaaaaactcctaggctcaagtgatcctcctgcctcggcctccctggtagaatagattttttaaacaatttttgggccaggcaccgtggctcacgcctgtaatcccaacactttgggaagctgaggcgggtggatcacctgaggtcaggagcttgagaccagcctggccgacatggtgaaatcccgtctccactaaaaatacaaaaattagctgtgcgtggtggtgcatgcctgtagtcccagctattcaggaggctgaggcagcagaatcacttgaacccaggaggcgcagattgcagtgagccgagatcgcgccattgcactccagcctgggcaacagagcgagacagggcctcactctgtcccccaggctagagtgcggtggcacgatctcggctcactacagcctcgactccggcctccgtctcctgagtagctgggactacaggcgcccaccaccatggccagctaattttttccattttttaaggagccaagtctcactatgttgcctgggctgagcccgaactccggggctcaagcaatccgcccacttcagcctcccaaagtgctgggattacaggtgtgagccaccaccccagccggtttctcccttttagaaaatttaccactaggagccaaaatattttttcccaagctcgttagccctttgacttctgttaccatcctcctcatcttttccgaacgaccacttctcttgtcatgagctgacacagctctctgggatggggttattaagccctttccagcaaaaactgcaagtatgtttcccagctgggagggtgctaaggcatgtgttactctggtcctgctcctgtgatacattgtctcccaactccggagaaggaggtcagggtttcagttcctgggtctgtttctagggatgccaggtgggagtatggttttagaaaagcaacttggggccgggtgcggtggcccacacctgtaatcccagcattttgggaggctgaggagggtggatcacctgaggtcaggagttcaagaccagcctggccaacatagtaaaaccccgtctctactaaaaatacaaatattagctgggcgtggtggtgggcacctgaagtcccaagtactcgggacgctgagacaggagaatcacttgaacccaggaggttcatcccaggaggttacagagctcagatcgtgccactgcactccagcctgggcaacagagcgagactctgtctcaaaaaagctgggtgcggtggctcacacctgtaatccgagcactttggcaggctgaggccggcagatcacgagatcaggagttcaagaccagcctggccaacatggtgaaaccatgtctctactaaaaatgcaaaaattagtggggcgtggtggtgggtgcctgtaatcccaactactcaggaggctgaggcaggagaatcgcttgaacccaggaggcggaggttgcagtgagccatgatcatgccattgcactccagcctgggtgacagagcaagactccatctcaaaaaaaaaaaaaaaaaagcaaagatggggaaaattggggacgtcgcctatcccgacccctgtgcctgacacgcagcccgtcacagggcgtgggaagcacggggcagttgcggggaccgccgtgttctcagccacccacccagggcccccagcatctctccagcgtctcctccatttgagttcaaacatgggccctttctacaatcagctttgtttgtgtggtgtttggaattgccatcctggaggccctgggtactgttgtgattcctaggctggtttcctggggctccgtgtggtgggggcctctggccaagctgctgtaacaaagaccacaaacctggtagcttgcaacggcacacagtcaccatctcacagtctgcagggcaaggtctcgctctgtcacccagacttgggtgcagtggtacagtcgtggctcactgcagcctccaccccctgggctgaagtgatcctcccacctcagcctcccagagtgccaggaccacaggtgtgagccaccaccatggctggcccaaatcaccccttatttatttatttatttatttaggagacggagtcttgctctgccacccaagctagagtgcagtggtgcaatctgggctcactgctacctccgctccccaggttcaagcaattctactgcctcagcctcccgagtagctgggattataggtgcccaccaccacgcctaactttagtatttttagtagaaatgtggtttcacatgttggccaggctggtctcaaactcctgacctcaggtgatccgcccaccttggcctcccaaagtgctggcattacaggtatgagccaccacgcccggccaaatttcccatctttataaagaaaccaggcatattggatcaggatccactgtactcccgaatgacctcgtgttaactgattacatctgcagagaccctatttccaggtaaggtcctggggttacaactgcagtctgtggatgatttgtgggggacgtggttccaccctagtgcctgccacctgccatctctctgggggtttgatgcccttggggtgcctggcacctcactctcagctgctgccaaagcccttcttgagctcgtcaaggtcaccctggattctaatcccaacccccaggcacttcttggcaccaggaacattttctgcaggtggcctgcgaaggagctgggagctgtgctcaaatgcttcctcctaacaagccttccgtcctggggactggcactgtgttgagacgggagagactccaggtccgcagagggcaccgtcctgcctggaggttcaggactgccaccattcatctccgtgaggagctggagcaggcgtcctgcctttctgtgtcctctaccctggttttgaatagaaggcatcctggctgggcagggttcttcagggagcaggtgatccggcattcagccagattcttgaaaaccccctgggccgggcacggtggctcccgcctgtcatcccaatactttgggaggctgaggcggggagatcacctgaggtcaggagttcgagaccagcctggccactgtggtgaaaccccgtctctggtaaaaatacaaaaattagccgggcatggtggtgcgtgcctgtaatctaagatactctggaggctgaggcaggagaatcgcttgaactgggaggcagaggttgcagtgagccaagatcgtgccactacactccagcctgggcgacagagcgaaactctgtctcaaaaacaaaaacaaggaaaacactccagcccccacaccagcacggggactgcagcgcccgcgagacttgggtcacggtgactcctggaggctttgcacgttaagccgccgcctgcccagggacactgtggtcaccttcccccgccggagccctgcgtacctctcctgtctgtgctttgagagaggagtttttttcccgttgcttctggaaccctgggttgtcctgcagaataggacaccctccttcattacgatagaggatgcagagccgctccctggcaggtgttcccagtcccagcaggggtttccagagacacagggtgcggagggattctccaccaggagatggttccagatgcgtaagcccgtcccctctgcaaggccctgtccccaaagagcttgggcctgtgggtcccacagctcctgcgagtgaccaccaccgtccagggccccccaagctgttcactcacgggtctgggtggaggcagacatcctgggaggaaccccaggggtgtggccgaggctgcacagaggcctctccacgcctcctggagggatgggagttagtctcggctggagtggagggtggggaacccagagtcaggagcacccagagtccaggtgggaaacgcctgaggcaggggccctgcttccacccctgctgcaggggacactcagggtcctccacctgggagtggccacgctggtggccctttgcggccctgcacattacagccctgccagctttggggagagctgacatctcaaggaagtcctttttaaaaaattttatttagccgggcgcgggggtgcacgcctgtaatcccggcactttgggaggccgaggtgggcggatcacaaggtcaggagttccagaccatcctggttaacacggtgaaaccccgtctctactaaaaatataaaaaattagctgggcgtggtggcgggcacctgtagtcccagctactcaggaggctgaggcagaatagcatgaacccggaaggtggagcttgcagtgagccgagatcgtgccactgcactccagcctgggctacagagcaagactccatctcaaaaaaaaaaaaaaaaaaaaaaaaaaattatttaatggctcacgcctgtaatcccagctctttgggaggctgaggcaggtggatcacgtggtcaggagatcaagaccatcctggccaacatggtgaaaccccatctctactacaaatacaaaattagctgggcgcggtggtgtgtccctgtagtcccagctactcgggaggctgagacatgagaatcgcttgaacttgggaggcagaggttgcaatgagccaagatcacaccactgcactccagcctgggtgacagagcaagactccaacacacacacacaaaaaatttatttaaaatgttttattaggctttccctatgttgccccggttggtcttgaactcccgggctcaagcaatcctcttgcctcagcctcccaaagccttgggattacaggtgtgagtcactatgcctggcttttgaaacatgttttaaggtattttaaaacttttaattctga[139 bp omitted]cggtgaaaccccttctctactaaaaatgcaaaaattagccaggcatggtggtgggagccagtaatcccccctacttgggaggttgaggcaggagaattgcttcaacccaggaagcagaggctgcagtgagccaagatcgcgccattacactccagcctgtgcaacagagcgagatcctctctgaaaaaaataaaatatgccgggcgcagtggctcacgactgtaatcccagcacttttgagaggccaaggcacgtggattgcctgaggtcaggagttcaagaccatcccggccaacatggtgaaacccagtctctactaaaaatacaaaaaaaattatcctgcgtggtgatgtgggcacctgtaatcctggctactcatgaggctgaggcaggagaatcacttgaacccaggaggcggaggctgcagtgagccaagatcgcaccattgcattccatcctgggcaacaagagggaaactcccatctcaataataataataataaaataagataaaaatgcaaaaatcagccggatgtgctagtgggtgcctgtaatctcagctgcttgggaggctgaggcgggacaattgcttgaacccaggaggcagaggttgcagtgagctgagattgcaccattgcactccagccagggtgacagagcaagactccatctaaaaaaaaaaaaaaaaggagctctcaagccaggaaaagacatggagaaactgtaaatgcatgtgaccacgtgaaacaagtccgtctgaaaagcctccgtgctgcaggattccagctttaggacgttctggaaaaaggctaaactacagaaacagtaaaaagatcagaggctgccaggggccggcagagggagggatgaacaggcagagcacaggatttctagggcagtgaagctattcgatctgag[138 bp omitted]atggtgaaatcccatctctactgaaaatacaaaaaaaaaattagccgggtatagtggtggtcacctgtagtcccagctacctggggggctgagggaggagaatcacttgaacccaagaggtagaggctgcagtgaccgacatcgcaccactgcactccagcctggccgac[133 bp omitted]catcatgctgaaactcgtctctactaaaaatacaaaattagctggaagtgctgtcaggcacctgtaatcccagctactcgggaggcggaggcaggagaattgcttgaactcaggaggtggaggttgcattgagccaagattgcaccactgcactccagcctgggtgccagagtgagaccccatctccaaaagaaaagaaaaaaataattattttttttctgggtgtggaggtgtgcacctgtggtcccagctactcgggaggctgaggtgggaggatcgcttgagcccagaaggtcaaggctgcagtgagctgtgatcatgccaccacactccagcctgagccacagacagagtgagaccctgtctcaaaataaataaataaaataaaaataaataaagttccctcaaatccactttgcaatggacgcatttagagtgtcatgtttgcacaaatgtggtcacctgccacagtgggcgagatgaagaccacagccaatataattacggtacagacaattgtgaaagcaaaaagagggggaaggaagcccaggtttgatttctagctggggtccaaccctgaagtgggtgaggtaaagccagatcctgtgcacacactgctatgggcgctgctgggccttcttcctggagtttttgtcggcctggagtgggagccaaggctcttggggacttaaaaaggcaagatccagctgggcatgatggctcacgcctataatcccatcactttgtgaagctgaggcagggggatcacctgaggtcaggagatcgagaccagcctggccaacatggtgaaatcccatctctactaaaaatataaatgttagccatgcatggtggcgggtgctgataatcccaggtactcgggaggctgaggcaggagaatcgcttgaacctgggagtcggaggttgcggtgagcggagatcacatcactgcactccagcctgggcgacagagtgagactccgtctcaaaaaaaaaaaaaaaaaaaaaaaaccctgcaagatctgcatttgaggtcagagtgtctgggggtagaaactgaaacagagttgggggtgaccctgagacagggtctgggttctctgtggcaggtgcagcagtcacccagtctcaggggggagatgggaggatggggaggttgtctgcgaattgcaggctgtgtctgcgtgcgagagtttcagacaaagaaggaagttattggctgagaacaatgtaagattatatgatgtaggaccttgaagaaaacaaataaaagacagttgtagattacccacgtctgggagaagaacaaggaaagagaaagaagagagaaaacaaatcctcaaatggcagcgctttttttttttttgaaatggagatgacaccttacagcctgccctgaaatgcctaacagctaaaatgaaaggctttttttttttttttgagacggattctcactctgttgcccaggctggagtgcaatggtgcgatctcagctcactgtgacctccgcctcccaggttcaagcgattctcctgcctcagcctcccaagtagctgggattacaggcatgtgccaccatgcctggctaattttttgtgtttttagtagagacggagtttctccat[136 bp omitted]gagacagagtctccttcttgttgcccaggctagagtgcaatggcaccgtcttggctcactgcaacctccgcctcctgggttcaaacaattctcctgtctcagcctcccgagtagctgggactacaggcacatgtcaccatgcctggctaatttttgtatttttggtagagacagggtttcatcacgttggccaggctggtctcgaatccctgatctcaggtgatctgcctgtctcagcctcacaaagggctgggattacaggcatgagcaatgatgcctggccctcactgctaaattaaaaaaattttttggagagacagggcctggctatgttgcccaggctggtctcaaactcctgggctcaagcgatcctcccgcctcagcctcccaagtagtttgggattacaggtgtgtgccaccatgcccagctaattttttttttttttttttttttgagagagtctcacgctgtcacccaggttgcagcccagtatcgtgatctcggctcactgaaacctccacctccctggttcaagtgattttcctgcctcagcctcccgagtagctgggactacaggcatgcaccaccgcacccagctaatttttgtattttagtagagacggggtttcaccatgttagtcagacgggtctcgaactcctgacctcagatgatctgcctgcctcagcctccc[136 bp omitted]tgggttcacgctttctccttcctcagcctccccagtagctgggactacaggtgcgcagcaccacgccctgctaattctttgtgtttttagtagagacggggtttcaccgtgttagccaggatggtctggatctcctgaccttgtgatccgcccacctcggcctcccaaagtgctgagattacaggcttgagccacagtgcccggcctcgctaatgttttaatgttttctagagacgggtctctggtcatgtggcccaagctggtgtcaaactcctggcctcaaaagctcctcccacctctgcccccgagagcactgggattacaggcatgagctactgtgcacagctctaatctcttcttttataacgacaccagtcacaatggattagagcccagacatatgacattttaccttaatctcctcttttttttttttttttgtttttgttttttgagatggagtttcgctctttttgcccaggctggagtgcaatggtgtgatctcggctcactgcaacctctgcctcccgggttcaagcgattctcctgcctcagcttcccgagtggttgggattataggcatgcaccaccacgcccagctaattttttgtatctttagtagagacgggatttcaccacg[136 bp omitted]gggaggcctcacaatcatggcagaaggtgaaagacccatctcacatggcagcaggcaagagaagggagcttgtgcagggaaacttggaggctgaggcaggtgggtcacttgaggccaggagtttgagaccagcctgtccaacatggtgaaaccctggctgtactaaaaatacaaaaaattagccaggtgtggtggcggatgcctgtaatcccagctacttgggaggctgaggcaggagaatcacttgaacccaggtggcagaggttgcagcgagccgagattgcaccaccacactgtagtctgggggacagagcgagactctgtctcaaaaataaaatataaccatcagctcttgtgagagttattcactatcaagagaacagcacgggaaagacctgttcccatgattcactcgcctcccacaaggtccctcccacaacacggaatcgtgggagctacaagatgaggtttgggccgggcgcggtggctcatgcctgtaatcccagcactttgggaggccaaggccggcagatcacgaggtcagaagatcaagaccatcctggctaacgtggtgaaaccctgtctctactaaacatacaaaaaaaaaaaaaaaaaattagccgggcgtggtggcgggcgcctgtagtcccagctactcaggaggctgaggcaggagaatggtgtgaacccgggaggcggagcttgcagtgagctgagatcccgccactgcactccagcctgggcgaaggagcgagactcggtctcaaaaaaaaaaaaaaaaaaaaggtgaggtttggatggggacacagagccagactctatcaaaggtcttaaaattcttttcacttgggtttgtttgtttcacaataacagaagtaatacaagccccaggtaagcagtcaaacaaagctaagaaacaggatggaaaagacactgatcctgtccttattccaggacggccccaggctcctcaacgcctcccacccgtgttggtagagacagggtttcaccatgttggccaggctggtctcaaactcctggcctcaagtgatccacctgcctcagcctctgaaagtgctgggattagaggtgtgagccaccatgcttggccccaaaatcgccttaatattcatcccttatggggacacagacacatactgcacatctgctgggtgccagccagggtccagcaagtcctgcctgtctctgcctcaattttcttttttctttttttttttttttgagatggaggtttgctcttgttgcccaggctggagtgcaatggcatgatctcggctcactgcaacctccacctcccaagttcaagcgatgattctcccgcctcagcctcctgagtagctgggattacaggcacccaccaccacgcccagctgatttttgtatttttagtagagacagggtttcaccatgttggccaggctggtctcgaactcctgacctcaggcgatccacccgccttggcctcccaaagtgctgggattacaggtgtgagccaccgcgcccagcctctgcctcaattttctttgagtcagtgtctcgctctggcacccaggctggtgtgcagtggcgcaatcatagctcactgcagcctcgaactcctgtattcaaatgatccttatgcctcagcctcctgagtagctgggaccacaggtgcgtgcaccaccacacctggctaattttgttatttttttgtagagatgggggtctcactatgttgcccaggctggtcttgaactcctgagctcaagggatctgcctgcttcagcctcatgagtagctggacatgcatttccatcttgctctgtgttagctgggggaggccagctcctgaaagcccttgcccttcccaaaatgctgggggacgtcctgacccccccatttgtccttcctgtgtctctctggctatctgtctgtgtcttcacctctctgggtccccaccttccacagcccctctccggtgacccccaaactgcagctgtattctcctgcagaggagttcggcggtctctttgtgggtcgtttttatctcatgccctcaggcctccctcacgtgcccctggccctaattaaggtattttcctaaacaagcccagttgcgtctcttaaaatgaattctggtgccagctggtaaaattaatttttttctcatcctctacaatgcaagaatgaatgacacacggtcgcttgtccacaggaggccggcgtcctgcggaaggacaagcgtgtagaccagtaattacgttccagtgtggaaagtgtcccacatgagtgcggcggagcgaggtagccctgaaataaggggcatccccacggtgcagctactagacatggctaaggttgatttcacactcaccctcgctggaccgtgttggatagtgtcagccaaaatatatgtctccctagaacctcagaatgtgaccttccttggaagtagagtctccacagacataattagttaagatgagattgtggcagggctcagtggctcacttctgtaatcccagcactttgggaggttgaggcgggcggatcacctgaggtcaggagtttgagaccagcctggccaacatggcgaaacctcgtctctactaaaaatacaaaaaaattagccgggcgtggtgccgcgtgcctgtagtgccagctactcaggaggctgaggcaggagaatctcttgaacctgggaggcgaaggttgcagtgagccgagatctcactacttcactccagcctgggcgagtgaagtagtgaagaggctgtctcaaaaaaaaaaaaaaaaaaaagataaggttgtattggagaagggtgtgctctaatctaatgagatgtccttataagaggaagaggcatggaccacacactttgggaggtcgaaggtggaggatcgcttgaggtcagaagctcgagaccagcctgggcaacagagcaagactgtgtctctacagaaaatttctttttcttttctttttttttttttttgagacagagtctcagtctgttgcccaggctggagtgcagtggcgtgatcttggctcaccgcaacctctgcctcccaggttcacgccattctcctgcctcagcctccccagtagctgggactaccagcgcctgccaccatgcctggctaatttttttgtatttttagtagaaacgggggtttcaccatgttagtcaggctggtctcaaactcctgacctcaggtgatccaccgcctcagcctcccaaagtgctgggattacagatgtgagccactgtgcccagccacttttcttttttcttttttttttttttgagttgaggtctcattctgctgcccaggctggagtgtagtggcaccatctcggctcgctgcaatctctgcctcctggattcaaacaattctcctgcctcagcctcccaagcagctaggattacaggcacctgccaccacgcctggctaatttttgtatttttagtagagacgaggtttcaccatgttggccaggctggtcttgaactcctgacctcgtgatccgcccaccttggcctcccaaagtgctggaattacaggcgtgagccaccgcacccggctggccttttttttttttttttttttgtagcaacagggtctccctgtatagcccatgcctgagtgcagtggagcgatatcggctcactgcagcctcgaccttctgggctcaagtcatcctggtctccccaagacaatcctgacttccgtggagcccctgggtctccagaaacaccagtgacagccctctctcttgtgttctgaatttcctatgtaaaaacctggcttgtgtgaagggggctggtaattggacatctgtaaagctccttggcagtggggccccgtcaaagctggcagtcgtagctccgtgttaacaaggtcaaggtctggtcaaggtttccagtgtggtccccttatggcctaattagggacttgaatgggttggaacactgattgagtttcagttcagaggctattttgatgttacagttcaatcactttagaaaatatagattcagttctggttcaggctggaacactaggtgtgtgtctgtgtgttttaatctttgatttagttcatggttcagtatcaaacttaatacatttttcacccatcatcagattaacaaagatgagagaaataatcacgcccggccctcgtgcagggtgttagatgggccgtggtaatgcggggctgccgccaatgtgaattggtacctttctgaaaagcaacttgacgtcatctgtcaaacgccttgaggatgtccagaccctcagacccagcaatttccgcctccagggatttatcataaggatataatcagaggtgcaccaagatttacataggagagttgctttctgcggccttatttaaatcatggaaaaatcaggaatcgctgaaatgtctcacaatagcggtctggttaataaaaatacgatagcgaccgttgtcttacaacgccttgagtagcagagggaattgtgtatgatacatttcccgcagaaggggaaacgttttaattaaagccataactgacgtggagccggaagaagcctgtgaaaggacgttcttgcatcgacctgccaggcctttgtgctgccttagaagcagccgctttattgcaactgtgaatctctatggtttaggagagaaattcattctttaaacaaaatttgagtgagcgctcggtgacacggactgggcttacaatggtgaagaaaacaggactcagggaactcacagacgaatggagaagacatttaataaaataagacctaacatttcaccactggcacaagtactttaaaagcattaatttatttaataccagagccagaggccaggcacggtggctcacgcctgtcatcctagcgtttttgggaggtcgaggtgggtggattatgaggtcaggagttcgagaccagcctggccaacatggtgaaaccgtctctactaaaaatacaaaaagtaggcgggtgtggtggcgtgtgcctgtaatcccagctactggggaggctgaggcaggagaatggcttgaacctgggaggtataggttgcagcgagccgagattgcaccagtgcactccagcctgggcaacaagagcaagactctgtctctaaaacaaattaaaaaaatatacctcatttgagctcataggagctttgaactcctgggctcaaggaatcctcccatcttggcctcccaaagtgttgggattacaggcgtgagctgttgccacgctgtgttttgttttgttttgtttttgagacagggtcttgctttgtcatgtggagtgcagtggtgcaatcacggttcactgcagcctcgacctcccagactcacgcaatcctcctgcctcagcctcctgggtagctgggactacaggtgtgcatcaccatgcctggctaattcttttttgtttttgtacaggcagggtctcactatgttgcccaggcctgtctccaactcctgggctcatgtgatcctcccatctcagcctcccaaagcacctcccaaagcacaggcgggagccaccgcactgggccccactcctcctgaggcagaggcttggatctggcacagcaccccttctgctgtattccctgggctgaagcaggtcacacgccagcccaggattttttcttttttctttttgagacagagtcagtcttgctctgtcacccacattggagtacactgacgcgatctcagctcactgcaacctccgcctcctgggttcaagagattttcttgcctcagcctcccaaatagctgggattacaggtgcacactaccacgctcagccaatttttgtatttttagtagcgatgggggtttctctatattggccaggctggtctcgaactcctgacctcaggcgatatgtctgccttgacctcccaaagtgctgggattacaggcctgagccaccgccagctcagatttaacgtgagaggatatcagagacatagttcttgccaaccacccacagaccaccacccccattttatagacaaactgagacggctgagcaaggtggatcctacctgtgatcccagcactttggggagccgaggtgggaggatcacttgagcccaaaaggtcgaaaccagcctggccagcatagcaagaccctctctctacaaaaaataaaaatcttagccagccatggtggtgcgcactgtggtcccagctactccggaggctaaggtggaaggatcatttgagcctgggaggttgaggctgcagtgagctatgactgggccgctgcactccagcctgggccacagagccaaacttcgactcaaaaatgtaaataaaaataaaaaacaagtgaaaggtgaacattctcaacttgataaaggaaaaaaaatcagtcgctgaggttgctgggatcgaccgaagacacaaaccttctattcccgcaaatgtgagaaggaaaaagaagttagagccggctttgctgtcgccccttccccttgaagagtcggggccagtgcgtgacgaatgctgctgtaagtcttttaattttttccttttttgagacgaagtcccactctgttgcccaggctggagtgcagtggcgcgatctccccttactgcaagttccgcctcccgggttcaagcgattctcctgcctcagcctcctgaatagttgggattacaggcatcgccaccacgcccggctaatttttctatttgtagtaaagacggggtttcaccatgttggcaatgctggtctcgatctcctgacctcatgtgatctgcccgcctcggcctcctgctgggattacaggagtgagcctgtatcttttttatagagatggggtctcgccatgttgcccaggctggtctccaatccttgggcttaaaggatctgccaattcggcctcctttgcttttaaagaactgtgggggctggcgaggtggctcaggcctgtaatcccaatactttgggaggccgaggcaggccgatcacctgaggtcaggagcttgagagcagcctgatcaacatttagtattctctactaaaaatacaaaaattagccgggtggggtggcgcgcacctgtaatcccagcaggaggaggctgcagtgagctgagctcgcgccactgcactccagcctgggtgacagagcgagactccgtctgaaaaaaaatcaaaaaccgctcagggaaaggcctgacactgatggagcgaccgctccggggctcccgccacccgcggctgtttccggtgccccccggggtcttgggaccctcccaaggtgggtcctgctctagttcagaagcttatgacgcctttgcggggatgcctggctttgggatcggttgggatctgctggaattgggtccgtggcgcgcagctcccgggctgggaggtgccgtaggacctggaagattctcgaaagttctggaaggttctctcagggatcgccgcgggcgggggagcctgttttcccaccgagacccgcgagggcggtgtccggggtctgactgcaggacaaagggccgggagcgcgggagggcggcgcccgggagcggccacacatgccccgccaaccggtctcctcaggcagcactcccgggaaaaaggggtagacgcgcggcggaaggggcggggccggcgcgcggccgtggacgccggagagggcgaggccggcgctccttgggagcgcgcgcgtcccattgggcagcgggcggaagggggcggagcttggcgccgccgcgaggcaagccccgcccccggccccgcggggagcggcggcggcggcggcggcggcggtggcggaggcggtgagcgcgggcggcgcggacggcagcggttggcgggcgggtcctccgctgttgcggccgctgcggcctccttgcccgggcttggggcgccgcgctggggaaagccgggggcccggtgagcccgcgggatgcgtcccctcggttccgccgggcggggctgaggcgaggaggccgggcctggggggagggggggccccggcctagagactcctccgggagcgcccggtccctaccgccgtgggtcccccactctgcccggacccccttttccgcccctggcgccgtgggcccctcactttgcctggactccttttcccgtccctgccgcccggaccccatctcttgcttggacccgctcccccatccttgctgcctggacccctatctccttccctggatccccctcacgtctgccgtgaaccccatctcttgcctggacccccatctgcttccctggattccccacccccaaccgtgaaatcccccatccctgccacctggaccctccgctccacctcctccgtgagccctcgttcttgctccctgagcccccccgcttctgctgtgacccccttctctgttgcctgaatcccccgttcctgcaagccgcaacccttcctccgccatgaaatcttgtccctgctgcctggacccctacttctgctgctgctgtgatcccctctcttgctggaaacgccacccctacctctgctgggaacctcctcttccctgctgcggggacgcccccctccgttgttgctaaattccacccccacccccaaacctccttttcatttctgtcaacagccaagccagtccttcccattgatgctgtgaacggtctgcagctgtccccgttctttcagggacatggcagccaaaagagcagtcgtttttccgctcttatttttgtgtgtgtgctgtggtcaactgttaactccccaaattggggagggttgtgagctttgattgtgtaaaatgcctctcctgccgaggtcggaggcaggtcttccgcacggagatgatttattcaggagccttttaaaactgatctagatagaacctttgggagggactgtgctgtattttatttatgaaaaaatgcaggcgcctccctggataccgagccccgtcgtttctgtttgtcagtctgctttttggcattgagcatctcaatgcaagattgtggaattaaaccatctacttgaggctaagtcgagctaacctttgcccctgagggctgtgtctgcgttaacatcgccagcaaacagttgtataaaccaccgtgcaaatttcgttccaggacacattggcgtgagacctgggagtacgttgtgccaaatcattgccacttgccacatgagtgtaaatgatggcggatgccaagtatgtcctctgccgatgggaaaagcgattatggcctgcgaaggtgacagccattattctgtaacttcaggacttagaaatgactttcgggtgacaagtaaaatcttgatcaggagatacctaggatttgcttcagtgaaataattgagccagaacacggttggcactgattctcgttccccatttaatggggttttggtctagtgcttccaaggttacacttccagaaatgtcttttttttttcacactaaaaaaaaaaaaagaatcagctgtaaaaaggcatgtaaggctgtaactcaaggaaagatctggcaagcagccctgtgatagtaaattatggtcgtgttcagggaatgctttccagcaattcagtagacagtgctcagctgcaatgcaaaagcccaggtccttgtctttgtctgccactggcctctcatgcctcagtttccccatctgtgaaacaatggggattggaccaaatatctgaaatcccatggttataggccttcaggattacctgctgcatttgtgctaaagtttgccactgtttctcactgtcagctgttgtaataacaaggattttcttttgttttaaatgtaggttttggcccgaaccgcgacttcaacaaaaaataagagaagaaaggaatattttctagctgtgcaaatcctctctctagaggaaaagttaagtgttgtgttgttttaatactgttttttcccgtgtagatttctgatacttcaatcccctactcccccaaaacagttgaagcccagcccactcttaatgggcttattcaccatttgtgtaattcattaatgctcataataacctcatgagaaagcaactagtttgattttatgtcagtttggaagctgaagatccaaacgaggcattctgtgagatctatggagagattggtacaaacactgaatacatgtaaattatactcagggtagaccctatttgtggttaaaatagggatatttccttttttttttttttttttgactgtttcttaatcagtgccatgccaggaaaatagggatgtttccttcccagagatctgtgtgtcttttttcagaaacgtctgtgacaggcccatcaattttgaaatatttggtttttgagcctgtcactctaaaccagcgtttaacgttcaaaaggcaaataactgatgaccaggcggcacattgttctgctccgtgagtgtctggcactgggaaaggtgtagattgtctagaatgacagcaattccgacgccccagtcagtcctgcgtgattgtggcgagggcgcgtctggcaccgggaaggtgtagatcatctagaatgacggcgattccgacgccccggtcagtcctgcgtgattggcgagggtgcatctgtcgtgagaattcccagttctgaagagagcaaggagactgatcccgcgtagtccaaggcattggctcccctgttgctcttccttgtggagctccccctgccccactccctcctgcctgcatcttcagagctgcctctgaagctcgcttggtccctagctcacactttccctgcggctgggaaggtaattgaatactcgagtttaaaaggaaagcacatccttttaaaccaaaacacacctgctgggctgtaaacagcttttagtgacattaccatctactctgaaaatctaacaaaggagtgatttgtgcagttgaaagtaggatttgcttcataaaagtcacaatttgaattcatttttgcttttaaatccagccaaccttttctgtcttaaaaggaaaaaaaaaaaaaaaccattcaccagggttcttgctgcctgtaacctcaggcagatgaattcctagttggctgtgacttttggtttaagtggaaggttgaggaggaaaatgaaaataattcttttgttatctaaaggaaaacatgtttgaaaatgtcttggcggcgttggctggtggtgtgtaacgtcgattttgtctctgcagaattaaggtgaaaagcactgaagttgagatcctagagaagtctcaaattgaagccattgcttcctcgttaggtaagagcgtatttttaagtggccactaggttttcataaaataagaggtcatttgggagaatgtgaaggctcagctttctgggtaaaaattcaccctgttcaccatgtttttcttcatacaagggaacgcgaatcccctgagctgaaggagaaggaaaaatggatccgctttcttaaacctttccagaatttgcccctagaaccactcctattcttgacgcccagaatggtcagtggtgagcatcaaggtcatctcgtacccccgtggcctccagtacacaagacgaggaaggactttgctgccataaggggggaggtcctcctttttcctttcctcttcctatagtaagatttgctgtggtactgtcgctgcctggccagtctggtctcagcccaaggtttgagaagcagttggttgtgtgtttaaaattccagagcagagcccaagggagagaacgggtggcctggcactggggttggtggcacccattgtttgaggcactgtcatggggggcacgaggcaggtcggaagtggagctctcggcttcccatccatccgggtgcgctttctcccaggccttcagtttagcacccacctcctttgcacactgtgggtgagaaaagctttgcctgagtccagccggggactggtcatgcacatacatgacaagtgaggagcactggtgactgcctgccccctagccacagttgtgcaaacccaaacctgccagccttccttctcaaagtggaactgtttatcccatttgcaaataattgtttctcttgtgaaaagatggaccggaattccttccaatgatgtttataaaatcaggtctattttcctgtgtcttccgaaaaacagctcttgtttaaagcaggatccatctctgcataacttaggccgggctgaccatcatcttggatggcgtcgtccttgttggcgcagattgtgttggggggctggttgtttgtgggcgcctttaatattcaaaggggagaatactgttctgattgaggcattatgcccgctgagttgtgatattacatccatcatcttgttcaaataaatagcgccgtatctatatgtcggaatgaataaataaaagtgctgcagcagggaggttgggctggaaaccagaggcccacgatgctctttgctggctttgaaatgcccttgcaaagaagtattgaaaatttaccagcccacaatgagtcttttaaatctccttttccttgctaccaccaacccctgcaccaaccaagaatacgttgccagcagagttctttatttagttggcattggtttttattgaccctgattgaatttgaaattgtaaggctgagagaggatttgcaaaacatttgaatacattttgctcacggtattgttttgtaacttggaggaatttatctttttagccaatcaggttaaggtcaataaatttggtttttaaaaaaatgaagcctcgaatcccggaatgaatagctgtcgttctgtagcctcgtctcctttttgggaaaatgtaggtgagaaatgttagtcctccccttcagtgatttaggtatgaaactagccgtcagaatgagacaagcgagcttctaaagcgatgccgtgaccgcagtgcctgtgcagtgaacgtaaccggcattgtgtatgttcggtccttgcagcctcacagaatgaggttcctgcggcacccctggaagaactggcctacagacggtcgcttcgcgtggctctggacgttctgagcgagggctcgatttggagtcaagaaagctctgcagggacaggtagagctgaccggtctctgcgagggaagcccatggagcatgtctcctcgccctgtgattcgaactcctcatctcttccccgcggagacgtgttgggcagttccagacctcacaggaggaggccatgtgtgcaacaaagcctgtcaagttcgttcacttgtgaaaaggaccccgagtgcaaagtggaccacaagaaggggctcaggaaaagtgaaaacccaagaggcccgttggtcctcccagctggaggtggtgcccaagatgagagtgggtccagaatccaccacaaaaattggactcttgcaagtaagaggggaggaaactcagcgcagaaggctagcttgtgcctgaatggatcttccctttcagaggacgacacggagagagacatggggagcaaaggaggcagctgggcagccccgtccttgccctccggggtcagggaggacgatccctgtgccaacgctgagggacacgaccccggtctgccgttgggcagcctcactgcgcccccagcccctgagccctcggcctgctcagagcctggagaatgccctgcgaaaaagaggccgcgcctggatggcagccaaaggccgcctgccgtgcagctggagcccatggcagcaggggccgcaccatcccccgggccggggccagggcccagagagtctgtgaccccgcgcagcaccgccaggctgggcccgcctccctcccacgcctctgcggatgcaaccagatgtcttccttgcccggattcccagaagctggagaaaggtaaaagtttctcgtggaggaggagagcgcagagggtggagtcctgctcctccgcagccagactgggagccaggcacgtgggtgtttttgaccagattttaatgagatcgttgccaaaatagacttagagcagagacttcctcattcctttttgtctgtctccccactgggctataattgcttcaacttctaaatatttgtcttcttatttttgtttagaagggaagggagttgagtgagtggggagcccgtagaggggcggcgggccacgattgtctgcggcgcggctgggagcattgtggctgtgctgaggccgcagctgcggctgcaccccgaggattaactcttttaacggaagcagtaacgcattcctattaaattgggcagcaatctcaaaagtgattcactcactcaaaagactgactttttaaagaattcctgtgcagatatatttttgtgtggttgcaggcaagcactgtgacttttttccttttaacactgtagcatcctttattttttaaatgctagttcagaaatcttaattaccacatgatcaaatgtctggaaatctacttgctacaaacttaccgcgcagatatttcagtctgtactctgaacttctttcctgaggtcatcatctccttagcacgttggaagcggcagggaactgaggttgccacgctctgaagacaaagtgaccgcacccctaccctgttccatagtcagctcccgtcccggccccctccctgcgtatccgcacctctgtcctgttccatagtcagctcccgtcctggccccctccctgcgtatccgcacccctaccctgttctatagtcagctcctgtcctggccccctccctgcatatccactgattgcttcagatgtgaagggacagccaggccgggacaaaagggattcccacccagggtgcgcgcagcttctgtggccgaggtggctgctgcttacggcccgccttcccttcaccgcaggcctctctccctccctccttccctccttccctccttccctcttgcgtttttctttaaaatgtagtttattagaagcgcactctgtttgaatttggcagtgtggagttgtgtatagcatggaaccttttctttatgcatcgatggtcatgtgtcatgaaatgttttcttgggatgagtcatcaagacaatgcaatgaccatgaaagtctaatatcacattattggcagagtgccagtcttccgaagagtccatggggtctaattccatgcgttctatcctggaggaagacgaggaagacgaggagccaccaagagtccttttataccacggtaagaaatgatcagggggcgccggcagtcctaacggtgcgctcagaggcagcggcggcggggctccgagaccgggccccacattctccatgaaaggtctcctgcgagttcatttctctcccactgaaccgagacctggaagggaccttcagaagtgtcacgttttcagtcctctatcttaagaataacctacacaaagggacgagagactcctgggaagagacggcccagccctccctgttagagcattactcctgtcacttacctcaagcccttgtcctcctgtcccctcgcggggagtgagggatggcccagtgagccgaggggctgcgtcgccattgctcgggtgtggccacgtactgtctcgcggcttccgttggtgatggcgtttggggggctgtccagggaggcagggccttcagcccaagagtgaactgctcccgcgcccctcctgtaagtagctgcttgcactagaggaaaacctgcctttaggtgcccctgagcatctacgtggaagggactagaaatgagagacccaaagatctgagccagccgcgaacagaaagtcggcttcgcaaaccaagtcacaagaaccagccccacttgagactcgcccgtgaaccattcctcttaaccaagtcttgtttttcttttctttaaccttctagtttcagaataattatagattcacaggatgttgcaaaaatagtaaagggaggtgagggggcttctcacccgggcttccccactggcagcatccgtaaggcgcaggatgtccccggccaggaagctggtgcgtgtgcagcctcgggagcgccattccacgcacacttgcgtgccggtggccttgttatgtcgttctttttttgtctacactgtttgagtgcttttccatcattgaaagggcttcattacagtctcacattttcccttttttttgcctaatgctaatggtcagactttttaacagttttccacatgctcttctgatccttttcctctggggtgagcagtcaccactcaccaaaccctgccccacccattgggcacctgtctggatggtcccaggaccgcaggtgctgtggggcacccattggggacttccaggaaatcatttctgcaggatccgttcgcacacacgaagagcacagtgccctcgggaagggccctttccgaccacgctgccccactggggttgggtcaccgggacatacagaggctggtgctgcctggcttctcctgcctgcggtgggagctgggttttgctcccgtttggttttgttttctacctgtcaggctgggcgtctttctgagggttccctgaccggcctctgaattgattgtttgtccacgtgggcctggaagtttctcttaaagactaaatgcccctcactggggaaacgacgctgtgccatgttcacagcagacactcaccccagtgggcctccctttttctctggtcacgttggttacttcataggcctttaggttttgatctgtgtttatggaccacggcacttccttccttccacagtgcggtcagacacaggctttgtgtgtctaacgacagactgtttccagtagtttttctaatactttagttttaaaattttaaataattcacttgttttttggcattgaaaatatttcattcataaatagtttctagttatgatttaaataattttcccatttttgactgtagtttcccagaatcctctttagaatctcagtccttgtgtttgggtcttctccgcgtgccattacctcacctctgttttgtgccacacactctttaaaagtgtcttcccgcggggtttagagttaggaaagtcgcgcacacataggacagagccccagccgcccctcgtggcacccctcccatcccaagggtgcgtttgtcgcagctgggaacccagtgcagcaccccactcagctgctggtttcactgtctcatcattggtggttagactcaagtagtgtggggtatgtgaatctgcctttcagattctcctgatcttttaagcgaatgacacaaagtcaggttttaacaatatcgtgctaactgtgttttctcaggctgttacacctggtgcttgatatggatttgacttgtctattcttttttttttgtttttcttttttctttaattctagaaccacgttcgtttgaagtaggaatgctagtctggcataaacataaaaaataccccttctggccagcagtggtaagaacagcttcctccgtcttctcagatgtagttacttaaatttcatgaatttttattccatccatctttagttcttgataatttgatcaggataaatgttttcattgttttgtttttcctgggaaaagttggtgggtttttagaaaagacttcaggagatgcctgtacctaaattaaggcacaatggtgttaagttgataggccacattttcaccaagcaggcttagaaagacctactcgaaaaaaatatttgcggccgggtgcagtggttcatgcctgtaatcccagcactttgggaggccgaagtgggtggatcacctgaggtcgggagttcgagaccagcctggccaacatggtgaaaccctgactctactaaaaatacaaaaaattagccgggcgtggtggcgtgcgcctgtaatcccagctactcgggaggctgaggcaggagaatggcgtgaacccgagaggtagaggttgcagtgagccaagactgtgccattgtactccagcctgggtgacagagtgagactccgtctccgggggaaagaaaaaggaaaaaaaagaattgtgatttgctcattttaaatattgtgcatttcaccccatgagagctcattaatttggattttgtggtggggttggttgcatgtgtacaaacaggaattcgaaatcctgtccaagttcccggtgtgggtgatgagttcaagccggggcagattctctgcttctgtctctgcaggcctggaagttgcaggtcattggtttgggtgctgtcctggccttcgcctctccttcatatcttacccctttttccctttatcctcctaagacacaaacgccaaaaggcgttggccctgcagtaatccagagacgcctttgttgctctaatgactgacctcactcgagtcacccaggctccttgcatgtgactgattgtggttccgggaaaccggggattgaatctgtgtggtgttcgctggggaggttcaacacgtttatggcctagctgggctccttgtgtcgcctactggccggcggagatggaggccgggcttctggaccctccgccctcccttggcactggtttcctctcccgcaccttggtagtctttcccttgttttcatcagtttctggggtccctgctgggttaacaggtcactgatgtgacaggttcctggggcataagagcaggcagcctccctgagagcgcagggcggaagggccatcggaggcgctggtcgccactgctcctcactgccttctcacggtggccccgggaggccaggactggggaggctgtggggaggtggcagcgccctgtagtccctgcccctccccgtgtggcctgggcttgttcccgagcctttctgcacttcctccactcacccagagcattaggaggacaaacctgccctgctgagccgctggagaatctcaggacgcttatttaaagaggcagctggcagcggtagctgtggttctttttattcaaaaacccaaacaaaactggctgattccgctcagatgggaaaacgttcaagtgatgcgtgtggcagagcatggggccgtttctcagcgcctccttgcgggagacttcgctggggtcacccccagagctggggtcagcgcctgttagatgtatcatgtgatgtcacaaaaaaatatttaaaatccacgatctcttttgttttgacgttttattttcttggatttgtgaacaggtcaaaagcgtcaggcagagagataagaaagcaagtgtgctatacatcgaaggacacatgaacccgaaaatgaaagggtaacccgctgttcttggtttctgtgaatgggcctgaggggccaggccggccgctctcagagtcagagcgggcgtggggatggagggacagaggggaggccccggcaggagtccaggcccgggcagggctagtgaggtctcactggaggtgtgcccttcttgtggcctctcactccctgggatgggtgagtcagacagaggctgggtgtgaagggtctggtcaaacaccccagttttcacaacttgatttgctggctttgaaaggcagcccaaccagacactcactggggccctgtttcccacaaaccagcaaaatgtccacgcaggtgtgcagacagcatccctgcgtccacctgagtttgcccctgggttacctggtcgttccttagtcatgggatgaaagcacacgtggatggatcagccggctgaaagcagcctttagaaccatcgcattgcatatccccaagtcgaacgcgcagaaccggtgtcatctggtacttctgtgctgcccccgaggggtgggaggtgtggagtggagacccaggccccgaggtcggcctgtcctggcggggcccagtcagtgttgctgaagtcactggacccaccatggtgcattgggagcttcttggcagctggggaaacggtcaccttccataaataagctggggctggtggggcctccagcggcctccactgatcttaatcagagacagggaaaggtttttagcttattagaggaagttcattcatgttaacttttccctctctctgcttcaagtttcacagtgtctcttaaaagtttaaagcactttgattgtaaagagaaacagacgcttctggtaggtggatgatgttttgtgcttgctttaaatggtttactttgtgattagtaaatatgtcctctgtgtgtagctcttgaaatccatggctgcggtgtacgcgtgtgaatgattgtgggaagtagcagagccaggctgcgctctggccgttagagttagatcgtgggctcagtcactgcgctgaattctcacaactgtcctgggaagttgcggccccatttccccgctttacgggtaaggaagctggggctccggcgaggacagtttacccagggccaccaggcaaggctacagcagagagcctctgcgcaaggccaccgccttccctggccgactgtctcagtccaccccatgtcacggtggcctcggtagccagccccttgcggccgggggcgtccctagctcagcgtcgggagccctgtgggcgctcaagtgctgcagtgagcctggccgataccacgtggcagacgtcttgctgcagagtggcttcctgctccctggatctgcagccagctttcatcatgtgctgtcgatgaactgcaagggatttgtctaactcagaaatgtctatttcccctctggaaatactcattttgttgtggcgacttccagcaccaacacgtcaactcagtgcagttatttttactcctctggaaaaaaagaaaaagtggttgtgtcttttccactctcagggatctgagttactttcttttgttttttttgagacggagtctcactctgttgcccaggctggagtgcagcggtgcgatctcagctcactgcaacctccacctcctgggttcatgcgattctgctgcctc[131 bp omitted]tcagcctctcaaagtgctgggattacaggtgtgagccactgcgcccggctggaactgagttactttctaaaaatggatgaaggtgtggggtgaggagaagagcaggaagttccgtgccttaaacgcagaagggctgccgtttatatcaaaaaccctgggttctgagagcacagggtgcccgcttcttcttcctaagagtgcgctcacatctgcttgtgagtcaggtatgtggtggtcccgaagcccacttgattcagtggtagtcaccgtggcttctgagggatgatattggggaagccgtgctttaggaaagtgcgggggctgctgggcaggcagagagcggcgtccacccggccctgggatgtgcttatggggtgcccccgtacccctagtggccctcggctccagagtcttccctgggtcattgtgtgatggtcgtggctttatggcatctttgggacggctgtgtccttttctggggacccaccctgctgccagcccaggtgctgttagagcagcccaggtgctggcctagcctggctgcagacgatagctcccaacaaaaacggctgttagagcagcttatttccaggacttgatgtcctgtcatgtggcacagtggccacaggggaggtgtttgcaccgtcgatgcgttcagaccagcccaagccttcgggtccccggtgcccacctgcgttcagaccagcccaagccatcgggtccccggtgcccacctgcgttcagaccagcccaagccatcgggtccccggtgcccacctgcgttcagatcagcccaagccatcgggtccccggtgcccacctgcgttcagatcagcccaagccatcgggtccccggtgcccaccatttgagcagctcagggcccagacctgtgcctggtgcgtttcccatttaccagagggtccctgtgcgaggcgtctgccagagccccctttgtcagggagggtcagaggtgcgggctggagcgtgagcagcctggacacctggctggtccctgggctctgcgtggcttctgaacccagggtgcttggcactgcctcccactgacgcctgctgcccggatctcattgtagaatcaagccagggaggacttcaaccaggacatcggctggtgtgtctccctcatcaccgactacagggtccggttaggtacgtggggtgctggggaggggtggagctgggcagcaggcgtccagcctctgaagaccccttggacgggctgggccggagctgcctggaggcggggcatatttccgtgggcctggggcattccctgtgggtgggctggggttctggcctggcctgattatttcctaaacagagacgccgggccagcccctggaacacacttcctgggactcctcttaggtctacacagtgctctctcccctccaccccctgcaggctgcgggtcttttgctggctctttcctggaatattacgcggctgatataagtaagtctacaggcacatcttggaaaatgtggtttgccttttagccctttagaaaaacaatcttctatgtctgaagctgtggaaggggacgttggggtcaaggcactgtccgcagccacacagcattgttcaacctctatgaggttttgatgtgaccctgaggctccctgggacctggggctgctggtgtccactggcacagcatcccgagcctgccctggggccctcatcccatgggccacatccagcgtgtccctgctgtggctggtggctgcacacatcagatgttgtgaagaatgtaggccaggtgcggaggctcacacctgtaatcccagcactttgggaggctgaagcaagaggattgcttgaggccaggagttcaagactagcttgatcaacagagcaagaccccatctctacagaaaaatagaaaaaaatgagctgggcgtgtggcttgcgtgcctgcagccccagctactcgggaggcagaggtgggagaatggcttgagcccgagagttcaaggctgtggtgacctatgtgattgcaccgctgcactccagcctgggtgacagagcaagacctggtctcaaaaagagaacgtgtcacgaacaccgggatgtttggccaccacttcactgtcgatccagcattttcctttatcgacagtagtggagttttccatgcctcctggttggtggaggagtggacgtggctgaattgattctgcttgggcagtgctgcacgggcaggcgcttttctctgctataagggttaaacctggctgcagggcccagtgaggggggaaaggccgggggtcccagcagaggaagtgtctttaggagcgtgaatgctccactcccgtgctaacacggagctcgatcgctagggtctgcccccatccctgccatgtcgcagcctcccatcggccctgacccacagccacccgaggaaggcagcccacgcgctggtcccacgacaggtgcttcttttgcaggctatcctgtccgaaaatccatccagcaggacgtcttggggaccaagcttcctcaactgagcaaggggagccccgaggagcccgtggtggggtgccccctggggcagaggcagccctgccggaaaatgctccccgaccgctcgcgggccgcccgggaccgggccaaccagaagctggtggagtacattgtgaaggccaagggcgcggagagccacctgcgggccatcctaaagagcaggaagccatctcgctggctgcagaccttcctgagctccagccagtacgtgacctgtgtggagacctacctggaggatgaggggcagctggacctggtggtgaagtacctgcagggcgtctaccaggaggtgggggccaaggtgctccagcgcaccaacggcgaccggatccggttcattctggacgtgcttctgcccgaggtgagccgcggaccggcgtgtcacgtgggcagggaggggcctgcgctgggattttgcaactccgcacgaggaggctgccacggtcctcgcccctgctccctggccgttcggcggccaacggagcgtggaggcctcctgtgtttacatcctgtcagtgctgggaaatgcgagtgcgtgcgcttgaccctgtgcggagacggagccgcttacttgacccctgtgcagagatggagctgcttagaagctgtcagcaccagggggtgcgaactccctccctactgcgggcgcacagatgcttcccagcctcggtgggtcagtcctgggaaacccactgcgagttggaaattcccaagtcagaatcgcatttagtacccagataaacccactgtaagttgaaaaactgtaagtggataatgcgcctcatactctgataaacccgtggtaagttaaacacacaaattagactgtctgtgatttcgaacttcagctgcggatttggggcttggtgaggagcaaatacagatgattttgaagtttgtatctgaaatttcagagaggacattgctgggcatatgtgtacatctgtgggaaaaaaacatactcaaaactatttaactttataactatgggaattttcaaatagacccaaaaagaaaatagcataatgaactctaatgtgcccataacctgcctggaattattttttggagcataaaaaccctcaagcttttttttttttttttttttgagttggagtctcgctctgtcacccaggttggagtgcagtggcgcaatctcggctcactgcaagctctgcctcccaggttcacgccattctcttgt[222 bp omitted]tctaaaaggagggtgattctgccccctgggggacactggcagtgtctggggacatctgtgcttgtcacagctaagggtgcttctggcatggagtgggttggggcagggacgctgctcagcaccctgcagcgcctaggacagccccacctcagagaacagtctggccccgacgtccacagggccgagtgggagagactctgctctgaaccgaatggactctgttaaaaatgtgtttaccataatcacaaaagtaaaaaatagggatgatttcttaatgtcaggtatgtattgtgtattcaggatactcttttttttttataacaataaacttaaggccgggtgtggtggctcgcatcggtaattccagcactttgggaggccgaggcaggtggatcatgaggccaggagcttgagaccagcctggccaacatggtgaaaccccgtttctactaaaaatacaaaaattagctgggcgtggtggcgcgtacctataatcccagctactcgggaggctgaggcaggagaatcacctgaacccgggaggcagaggttgcagtgagctgagattatgccattgcgctccagcctgggcgacagggcgagactctgtaccagaaaaaaccgccaccaaaaaaaaaacttaaaatttttgagaaatgctcttgtgggtttgggtcttgccttttcttctctgcttttagtgatctgagctattgtgtctagtccgaaagatagtactgatttaattaagaaacatcattacaagcagggattcatggactaggtttgcaccttctgaaccatgagctagaccatgtctggaggctggaacctggtgacccaggctccctgcggccttcttaaccgcaggccacttggggccagttgggcagtgcctgctgctattgagccccgtgccctctcacaggccatcatctgtgcgatctctgcggtggacgaggtggactacaagacggctgaggagaagtacatcaaggggccttcgctgagctaccggtaggccgctcccggcgctatctccagccacttgcgtctctgccttgcagtttctatttccacacccacaggcagtttgactccaggctgccgcagcccctctccctcatgaggtggcccaggtgctgggtggtgagctgatcacatacgctgaactcaccctgtgggtcactcctgccccccaggaaggctgtgcccgggtctcccagctggtcgctgtgggcagcacggggccacgggcacgtgcctgggccgtgtctgttcttaatctctttttgcaggggctgatgtttgctttttgcactttcctcccctctttccacagccccatggctgtgtgagaaatacagcaagattaagcagcagcacggcccggtgctttccagcagccagaagaatgctgtgatcaagatgtttctctcacatccgtgtgcttagctgcccttggatgtttggcccccagagcgcctaatcctgtctctgggcatgcggccaggccttgctgggagccaggcggggcccacggggcagtgacaggctgaagactcaactagagtcaaggacagggtctccggccagggtggcttgcgcagccaccgacgtctcccgggcccacagtcacaggagactcctggtgaagacactgaactccctcaccagccccatgtcctccctgggcagggcaggaggggcccctggagaggccagggaggaggtgtggggcctcggtggcattggcaggccacccccgcagagctgcacaaaggtggaatttggccttgtttagggagtgttggcccagctggcttaccaaaacaggaaaggcctttggatacagaaactgggtgttttcctgctggatcttcatggttcccccgtcatgcttgccgtaagaataagtgaggtccggggagggggtaaggtcggagccaggacacctggacccagcctgctggtttgtcctctccctccgtctcagaagcctcttcaccgctccacgcccatctgtggaaatctttcatcctgatttttttttttgagtctgggttgccgacatcaaaacccgttaggagttcatcacagcttccagttgccatgaaagcctcccgtgacctgtgagaatggtgctggtgctgatggagaagttacttgggctgagcacacaggccgtgatttcatcacgccggggacatgctcaaaataacaagccagtgagcagcatcgcacttgatctttggcctcagtggagccttgggtcacacactgggcgtcctgggacccagtctccccgccgcacggcgtttcccaggccctcttgttcttttagagttgcaccatgagcctctctgcactcttcccaaggctgtcctcctcaggtctgcctttctctggtgctgcggccggtgtgctctcccctatttccaggtctgctggggcgcacatcagagccagcagccgttgttgatctcttttgatccagggcagccctattgctgagaggggttgctagctaagcaattgttataattttcctttacagggaggtcacttagtaaggacaatttggcatctcatactctttcgtaaaaaattatttttagtcagtcacagtggctcatgcctgtaatcccagcactttgagaggctaaggtgggaggatcctctgagcccaggagtttgaggctgtagtgagccatcattatgccactgcaccctagtctgggtgacagagcaacaccctgtctctaaaaataaatattattttaaaacattgttaaggcctggtgcggttgctcacgcccataatcccagcactttgggaggccgaggcaggtggatcacgaggtcaggagttcgagaccatcctggccaccatggtgaaaccccatctctactttaaaaaaaaaaaaaaaccaagcatggtggcacgcgcctatagtcagtcccagctactcagcaggctgaggcaggggaatcgcttgaacccgggaggtggaggttgcagtgagctgagattgtgctactgcattccagcctggtgacagagcgagactccgtttcaaaaaaaaaaaaaaatattacacatcctgtaaaagttaccatcctaaccttcttaagtgtatggttcgatggcggtgagcactttcacagtgctatgcagccggtactgctgctcatctccgaacttcatctttccaaactacagctctgtccccatcaaacaactgccctctcatatatatataatatatattatatatataaaatatatatagccatatatatttatatataatgtatattatataaaatttatatattatataaaatatataaattttatatataatatataaaatcatataatttatatattttatatataaaatatatattatatataaaatatattatatataaaatgtataattttatatattataatatatacaattatataacaattttatatattatataatatataattgtatatattatatataaaatgtacaattttataatatataaaacaatttaatatataatatatataaagtatgtatactttatattatatataaaatatataattttatatatcatatgtatatgtagacatacacacacacacatatgtatttatttatttttttttttttgagacagagtcttgctctgtcacccaggctggagtgcagtggcacagtctcggcccactgcaacccccccaccgtgccttggttcaagcgattcttctgactcagcctcccgagtggctaggattgcaggtgcccactaccacgcctggctaatttttgttatttttagtagagacagcattt[140 bp omitted]acagaatttagctctgtcgcccaggctggagtacaatggcatgatcttggctcactgcaagcaccacctcccggtttcaagcgattctcctacctcagcctcctaagtagctgggattacagacatgcgccaccacgcccggctgtttgtttttttttttgtttgtttttttttttttttggtattttttgtagagacagggtt[139 bp omitted]actaaaatgaagactcttgttttctgaagggaaaaagaaatatttgacaaccagctccttgaagagcggaaccggcgccgtcggtgagggagcagccggctgtgctgtcagcggggcctggcggtggaagcgcctccagtgtgcatgagcgtgtctgaagatggggggctcagggggcacgtttgcgtttggacctgtctgtgcgttctcctgcgtggcagtcctgatttccatgcttctggagaatccatttcgttaacactgaaagccagttctcttttcctggcagtttttttcattttatttttggcattttttacaagataccgttcgggaaaggcttttgaaaggacggaagcgtattcactgtgcgccagtactcctggctgtgctgtggtttctcccgacgtgcacatcgatctcgtatgtgtggcatctgatattaaacgggaggttttaagaagcgtctgccgtgatcatggagcttcggaagcgggaatggttcttccgggtttgctgttttgtctgtttcccccttgtgtggtttccgcctgcgacagttccagaatttgctctcccactcagtgtgctctgcagctgtgaggaaacagccttcgttagaggcgggagcagagacgagccgctgctctgtgtcgtgtttgctgtggccgcagggagaggagcaggacacgcacctttccaggggcctctgtgtcccgcactgtgtgtgagtggaccgcagcgcgcagccacatgccctggctgccatgggccagaccgcctccacctcccccgcccgcctggcctgtcctgagtgcatttccctgcactgtgtcgtcactgcacagccagtcaccgcggtctcagtcatcggcgcggatggctatgctggggtcccagggtggccgcagcagtcagggtcactgtgggagccctggggtggagtgacaaaccgcattgtcctgtgcccgccatggcagaagcgcagcctttgtatggaggcccaaccgcgctcccgtctggagaagcggcttccggggtgtggctgccgggtcggctctggtccacagcacggtgccggggctgcaggttgttgagggctgtgactccgtggggctcagccaggctccagcagggtcagacgtgctgttaagagcaaagccacagacgatgacttgtccattctcagtggatgctccaggctgtgcctacacagcagtgctggtgacatgtccagggttccagggcccggtggcctgggagctgctttctccccactggctgggctgcatctggccctggctggaggccttgctttgaggggctgtgaccctcttcccccaggccctccccagccgacgacagccaccggagaggagatcggaacacgattgtctcagatgcagggcgctgtgcgggacgaagccgcaaggactctcgtatcgggcccttgggactcgggaggtgccagaggcggcggctgctctggacctcggtgttcactgacctttgtttcacttgcctctgctcgactccgagagcaggaaacccggccgtggcctggcagctccgcctcccatgcccgcacgctggggtctgtcttgtctggagcagtggggcacaccccggaggaggcgggggtcagggctgtcggccttggccccctgctggtcgctgtttcggggactcggggcggccagtaccaccgcctgaggcggggctcagcagcgttgcatgtacgggcctcgtactgcctcatggaaaatcctccggagccgccctccattgtgggttcctgagagtaggacacattgccatggttttgtgggaatcacgcgcccctgatggaacttttctgctgttgtgaagtacttttatccatttgcttctctgctgaccttgccaagttgttcgaggtggaattaaacacctcccagacctctggcttgtcttttctgaacccccaaacacatcccactgcatgggttgtccaagcttggaaatgggagagtgaccctgccatccccagggacatggcctggccttggggtggattcccacctcactggcgggcctagggtgctgtttaaacagcagccagaggctgggcgcggtggctcacgcctgcaatcccagcactttgggaggccaaggcaggtggataacctgaggttagaagttcgagaccagcctggccaacatggtaaaacctcatctctgctaaaaaaaattagcgagcatggtggtgggcgcctgtagtcctagcacctggggaggctgaggcaggagaattgcttgaacccgggaggcagaggttgcagtgagccgagatcacgccactgcactccagcctggccacacagtgagactccgtctcaaaaaaataaacagcagccaggggcctcactggggttcatgcctgtggccccagctactggggaggcttagatgggaggaacacttgtttggaggtcaaggctgcggctccagtgagccgagatcacgccactgcactccagccggaatgacgatgagcacctgtgttgcagcatagccctgcccagcaggtggaaccagaatgtgccagaggcccccttgtgcgtcccaccccgcctgcaccctctgcccttactgtcctgtgggctctgagggtgtcaaggccgctgggacaggccctgcctgggtgcttccctcagtaatggggggtcgtgggtgctctgggttgtcagccgggcagttgagtgggagtcaggggtgctgacctcacaggcacggccagtgaggagcattccggggccctgaggatgccagcatgggtggtcctgggctcgccctctccacagcatggctggcgttcctcgactgccgccggagccccgggaagacaggcttgaccccgtgcacacacgcagggagacgccaggagccctgccctcagaagcctgcacgctttgcctctcttctggcagctagctaaccctgcatccccacctgagcctgtccctggcactgaggacactggacctgtgtcactggggtggggtgtcctgggtcctgctgggtgctgagtgtctccatgccaggagctcccgcctctaccatcgagatgaccacagatgtccccagacgtggcctggtgctccgtggaaaactgctgtccacaaaccatggcgtccttcccctgacccccgccccttccctctctggcttggcccagcgggtgtctcagaacctgggtgcgtgcttctgccagccccccaaccacctggcccacactccccaacccccttcactgagccgcagagacccccatgtccctgccaatgctttttccgaagccggtctcacttgttcccgccctggcagtgtgaggggaattggggtcccccctcagtggcacagctgtgcctgtctgatgacttccaccaagcccccttcactgagctgcagagacccccatgtccctgccagtgctttttccgaagccagtctcacttgttcccagcagtgtgaggggaattgaggttccccctcagtggcacagctgtgcctgtcggatcacttccaacaaggtggccttggtggccgcacggggcacttcgtccatcttaaaggggcaacacaggcatgcagcgagaattccaaaccacagaaacctcactctcatgggccccactgcctgaggcattttctgttttgcttttgttggtgggttggttggttggttggttggtttgagacagggtctggctctgttgcccaggctggagtacagtggtgcaaacgtggctcactgcagccttgacctccctggctcaagcgatcctcccacttcagcctcccaagaagctgggaccacaggtgtgcaccaccatgcccggctaatttttgtgcttcttgtagaaatggtgcttgctgtgtttccgaggctaagtgatcctcatcggcctccaaagtgctgagattataggcgagagccactgcagctggcctgcctgagttcttgtgcctctctgcctccctccctgtgccagcctcacgccccctcctcaccttccccaattcctactctcaccccgccctgggtccttcccctctcactggcctgagctgtttctggaactgctgcctgccctctgctcatgtcctgcctctgccccgtgaaaccagctcctccatgttccctgtctcaggggtgtcctccagggcccggagttcctgaaccagattcttctccccacctacctcacctttctgtccagtccgcctatcagtcagccccctttgcagcagaatgccaccccaaaacccagcgcctggaacattctccacacagtttctgtggggccgggatctaagggcagcccggccaggggcttctagggtggctcgtggggctgcagtccacatgctggttggggccacatcatcagaaggctccaacggggctgggggtctgaggagcctcgctgggggcagcagcccaggagccacagcagccgcccatgaatatcaccgccattctgttggtcacacagagcagccccggttgaacgtgaagaccctataggggctgggcttggtggctcacacctgtaatcccagaactctgggaggccaaggtgggcagatcacctgaggtcagaagtttgagcccagcctggccaacatggtgaaaccccatctctactaaaaatacaaaaattagccgggtgtggtggtggatgcgtgtaatctcagctactcaggaggctgaagcaggacaattgcttaaacccaggaggcagaggttgcagtgagctgagattgtgccattgcactccagcctgggggacagagcgagactccgtctcaaaaaaagaaaaaagaccccataggaaggcaagagcctgaacagcaaacgcaagcccaggagccctgtcatcccagcggccagaggaccatcccccttggctcccactgaactcagctgcagtccccaccccatcccccaccaccactagggctaagagccagcagaaatccttgggctggcttcattgttcctcccgggaagagtccagggcagctgacacatgatcccagcatggcacgccggggacaggggaggcactctgctgtccctgactgtatttaaaaaaaaaaaatccacaagcaaaatccctaatgagcaatgttccacagtaagtcctgcctcagaactgtgcaggcatcagaaacaggaatgcctgagaaacggccacggtcccaggagctgaggaaacaccacgcctgatgccacgtagggtcctggatggagccctaggccaggaaagggcattagaggaaacccaggaaacttggatagagtgtagattttggtcagtaataatgtatcatgtgacaaatgtatcacactcatgaactgggcatggggtactcacaactctaaattattctaaaaatattgatataaatttaagaccaaaaccatggccaggcgtggtgcctcactcctgaatcccagcactctgggaggccgaggtgggcagatcacctgaggtcaggagttcgagaccagcctggccaacaaaccctgtctctattcaaaatacaaaaactagccgggcatcgtagtgtgtgcatgtaatcccagctactcaggaggctgaggcaggagaatcacttgatccagggaggtggaggctgcagtgagctgagatcttgccactgtactccagcctgggtgacagagcaagactccatctcaaaaaataaataaataaaaataaaaccaaaaccctacagcacgggcagctatgagaactagagaaggaagagggttttgtgcacctgccagcctcttaggttcttgtcagcttttcccccaagtctttattattattatgtattgtagagatggggtcttgctatgttgcccagactggtctcaagctcctggcttcaagtgatcctcctgcctcggcttcctaaagtgctgggattgcaggtgtgagccaccatgctgggcccctccaatccttttgagctgcccaagaacagagaccaggcctggctttgctcagcagtgggtccccagcccatggcacgaattcagtaaacacttgttgtggtcctcaaggggcccccagtcttgctagtcacctgtgttcacctaatttgagcctctgttttctttactttttctttttcttttttcttttttttttttttttgagatggagtctcactctgtcgcccaggctggagtgcggtggcacgatctcagctcattgcaacctccgcttcccggattcaagtgattctcttgcctcagcctcccgagtagctgggatttagatacagggtttcaccata[131 bp omitted]caaaacctccagtggaattgtgaaaattaaatgatatgcatgcagaaagcgttctgcaaactctgttttgctagtttgggtgtttagtgttagtttttatatcattagtactggttgtaaacttatcaatttaagcaagatggaaaatcgagggtgtgtcagggaagggggaagtttgagctgaaattatgacctcttaggggtgggaagaggaggctttggggttgtgaggtctgagcccccttactttgggatgagtccacatcgcggcgactcctctgcagaatgcggtgatgttgcggtaaggggtccgggatagctgcgaggcagctggaccaatcctgaacgaaagacatcagtgatcgcaagaggcgctaaaacttctgccgaaacccgggatcgaaccagggacctttagatcttcagtctaacgctctcccaactgagctatttcggctgggcggcagagtcgctctcgccgggactccgtcccgcgctgcgccttccctgcgcaggcgcagtcgtttcgcgtcagcaggccccacatcctttgtaaggtctcccagggcgccggagcgcagtgtcgtctctgtggcgcaatcggttagcgcgttcggctgttaaccgaaaggttggtggttcgagcccacccagggacgcgtggtgacttttgccctcctggaataacaagaaaatgagtgtcgcctctgtttttgtcggtccgccgcagacccgcggcccccacgtgcgcactccgatgacctttccgcctcgggtgatctgggggtgcacggcgcaacacgaccacggaggccgaaagcgcagcggaacctcccggctccaggttccggtttccgcatgcgctccgagccgctttgggcggcggccccgggaacccggagcgctaaggagaacggacctcagaggttgtctgaaggccgaggccaagatggcggtgctgtcaggtgagcgcggcaccggcggcgggtgtggggccgcgcgggtctggggccgtgggagcctcgggtgtcgtggtggcgtcgggggtcggtgccggcgtcgtggccgcggtcctctccgggcttctccgagccggccgctcctcgggctccccgcccggcttgcgatgaacggtcgccgttattgcgtccagagtacagtcggggaaaccgaggcccggtaggtcatgacgcaagcctccagcctcaggaaggcgctcggggtggaggctggaggggccccattcacgtccccgagaccagggcacggcccgcgaggctgctcttgagatgccctggagagagcggggcctgcctgacaggctgggaaactgaggcccattgagggtcttcgaggtcacagggccgggcctgggaaggaacaggacccaggacatccacgccaccctgctggaccctccacctccctccccacccctgggaggtaagggcctctcgcagagcctgtcctgctccagggacttttttgggatcagctgaagcctgcggacctctgctcagataaagttattaaatgcatggaataaaatccatagaattgcaaggaaatcagttacacggagaggcagttattaaaagattgtcttgaaacctgattggcgacttagtaatctaagtgcttcccttatgaacgcgatctagcggcaggtctaattgcgactgtgatttggaaggagtgaggagtggaaatgaggctttgatgatacggaaacgtctgcagcccctgcaccatagctaggaaacatctgtgattccgcttggtgaaaagttacaggtcctgctaatactgccgtattttgttgtctatgctaagaattttttatttatttattaagacagggtctgcctctgtcgctcagactggagtgcagtggtgccatcttggctcatcactgcaacctgtgcctcccaggctcaagcgattctggcacttcagtgtcctgtgtagctgggaccacaggtgtgcgccaccatgcctggctagtttttgtatttttagtagagatgggggtcttgccctgttgcccaggctggtctcgaacttctgagttcaagcaatcctcccacctgagcctcccaaagtgctgggagccacggcacccagcctacgctaagaattgaatgaagggctaattttccataagatgctggtgacaacaaagacatatatatttttttattccaagcaaattc[134 bp omitted]gccaacatggagaaaccccgtctctactaaaaatacaaaatcagctgggtgtggtggcgcatgcctgtaatcgcagctactggggggctggggcaagagaatcgcttgaacccgggaggcggaggttgcagtgagctaagattgcaccattgcactccatcctgggcaacaagagtgaaact[132 bp omitted]agaaaccctgtctctactaaaaaatgcaaaattagctgagcgtggtagcaggcgcctgtaatcccagctactcgggaggctgaggcaggagaatagcttgaacctgggaggtggaggttgcagtgagccaagattgtgccgttgcactccagcctgggtgacaagagcgaaactccgtctcaaaacaacaacaacaacaacaaaaaccctgacccagaggcacagaatcccatcacctcagaggttctcagaagagtatctcctctgctaggagctcatccaaagtcctgcattttcagcttgggaaactgacacctggagtggggcagctcccaccagagcctggggctgggcagttagcctgtctgctgtgcccagcctcaggcatgccaagaagtaggtcacaggcttgtgtccttcagagagttgtggcctggacggggccatgggaaacagcaaccccggatgaggctaaggctggggtgagggaggggctcagaggcaggagaaggccccatggatcgctgcattcaggggcatcaaaccctggccctggcccctggaggctgcccacagcctctccatcgggcctcacctcacccacagcgacaaagtaccatcacctgggcagcttcaacagaagctgattgttctcacagttctgggggctggaaggccaagattgggggtcagcagggttggttcctgctgaggcctctgtccttggcttgcccgtggccatcttctccctgcgtctttcctctgtacatgtttgtgtcctgatcgccttttcttacaaggacataagtcatatcggatgagggcccaccctcgtgacctcactgtcctttataatgaccctttattttattttttgagatggagtctccctctgtcacccaagctggagtgcagtggcgcagcctctgctcactgcaacctctacctcccgggttcaagtgattctcctgcctc[134 bp omitted]cggcctcctgaagtgctggaattacaggcatgagccaccacgcccaggcattaatgatccctttaaagaccccatctccaaaagcagtcacattctgaggtcctggggttagggcttcagatgcaggtcgggtggagggtcacagttcagccgtcaccagcaccaagcctgcctttctggattcttccttgtgagccaggattcctggcacctccaggtttcctcccgctgagtgccccgggcgtggcaaggccctgctctggccttagtcttcgcctcgggaaggctctcccaggagacttcgtgcaggcgcgttccctcctctgcgcttcctttgaggctggctcctctaggggtgcttttctgtgtagattgacgtgggcagcgccctccccgcttagcggactgcagattcctgcaggatggggcctgtgctcagctgcgtgggaaacgcccgagcagcagccagggcctggagcacccagcacacgcttgtcaggcacagctgaggccaggacgagcactgggtgcccagggaggccccagcattgctggagtggcaggcaccccacaagcacgcatagatggagatagaaccgggtgccggcaaccggaggacctggggtcctggtgtaggcgggacgccccgggtatctgaactgaaacctgcctcatgagaaggggccagcagtgtgcaagtgtgaggcggggtgtcccccgcagggcagcagccagtgtgcaagtgtgaggcggggtgtcccccacagggcagcagccagtgcgggggccctggcgcaggaaagcggcaggtgccagtgaagatcgccagggcggggagacggggcagcgtttgggttccttccggggccatgcagtctcaagcaggggactaagactctctcgtgttctgaaaaccccctcgttacctaacgtttgttaagtggcactcgagttgggatcagagctaggctgtgcgggcaggagcctgatggggaagcgcctggaggccggccctgcgtgctgcccgcagctcactgttcccaccccgtggtcctctctgcagctcctggcctgcgcggcttccggatccttggtctgcggtgagtgcctgagtctccagccctcagctgggaggggccttcagcagcgacagacgaacggggcggggggggtggggggtggggggagcgccttgttgaaggtcacgtgtcatgttagggacaggatgcaggtgacggtctgcacgctgcccgtgatgtgccgggaccctccctgggacagtccacgcagtggcaaaggctggacagtcaggaggaaaaccctgtgggcccggctcagtgccgtcagagctcaccgccacctggggtgggaaggcattctctgagccctgtgcagatggcagctggggcaggcctcctgcagacccaggtgactgacagggcggtgagggcgcatgcccagggatcttaccttggtcatgtgtggagggcctgctgccagtttccttctgtggatgatcctgggaccgtccttgcttggacactgttgacctgctgggtacgtcacaaaagaagttccattcaagtctgggccatcattgggggtcggggcgatggccgcatggctccagcggctctggccagtggcccaagtgttgacaggcagaggtgagaacagtctcgcagcagggaggggagaggcaggacaacagtgagtgcggctgggggagctggaggggcctgggacagccactgacccgcgttccatctcccggcagctccagcgtgggcccggctgtgcaggcacgaggtgtccatcagagcgtggccaccgatggcccaagcaggtgaagctggccttctgggggaggtcgtaccccctcgccccacccccatcccttccttattttctgcatcagtgccgcagccactgaggtgcatggatggggcagggagggggtcacacatcccagtccctgacctcatgtgggtccaggcctctggcagcggccgtgggggctcgcatccgcctctgggaagcacctgcgtggctgacgcctcctgtgcccgtgtgtctctgtgccagcacccagcctgccctgccaaaggccagagccgtggctcccaaacccagcagccggggcgagtatgtggtggccaagctggatgacctcgtcaactgggcccgccgggtgagtactatgagctgtaggccctcctcgagcgccagggcctctctgcacactcacaggcacacacatacacacaccaacgtgcagacacgtacacacacaacacatgcatgcacactcacatgcgcacatgtgcatgcaagctcacatgtatggacagatgtgtacacggaccacacgcacactcacgcacacaatgcacatatgcacactcgcacacatgcacacttgcacacacatgcacacacaagcacatgtgcacacacgcttgcacacatacacacatgcacacttgcactcatgcacactcatgcgcacatatacacatgcacacgcacactcgcacacacgtgcacatatatgcacagtcatgcacacacatgcacactcacacacatgcacacacgtccttgtgtggacacatgcatgtgtgcctgttggcatgcatgcacacaggcacactcactgatgcacacacacccctgcggccgtggagcagggcggaccctcccggaggcccctgtgctggcctggtggcctgtggttccatctgaggattcggaccctgctggagatgacccctccgtttccgtcattctctttctggcgtccgtgtgttcctcttgtttctcttttaaggtgaaagcagtgttttaagttaaaaggagcgcgtgtgaaggcagtagatccttctcggtacccgtttaaagcctcccctgcctgtggcgccagcccccacgcagcccctgccatccccctgcagcgtgagcacgtgcagctccctccagctcctgcggcacttgctgcgacagcccgggttcaacaatcccccattgatggacgttcactgtttccttttgttttttgtttcctaaacaatgccacggcgaacgtcctgccagggccgcagtggtcgagacaaggatagtttttaatgcaggat[132 bp omitted]cctcctaagtagctgggactacaggtgcccgccaccacgcccgg[182 bp omitted]ccagcggccgtcccaacacaggcttctggcgggcaggtggacctggccatttctgcccgggcagccctgcctcactctgtagcctgaccctgtcacccgccaacacatgcagcagggcccctgccaggtctcagagccgcgtgcagggagagcgggaacggtgggggaaatgagaagccacagggatggaggagaggggagggagtggccaaggagatctgagagggcttcctggaggcgtcgcacttggtatgtggacccagatctagttaacgcagagagttcccggttagacctgcgctactactcgcctgtagcccacgcgctcagagagtggctggagccccctgttgaaatggtgggacttaggatacactgggttcgaggaactatgtgatgaggacagatctcacccgtttctctctattttatgtatttgaatgtggctggtggggcgcgctttacaactcttggggcccggaggccacctgcaggagccgctgtgcctctcacctctgccggctgccgccccgggacatgagtcgggggttctgggtgctccacgtggagtctcacgctgggccacgcggggctccgggggtggcgtctgacccgagcccggcctccgcagagttctctgtggcccatgaccttcggcctggcctgctgcgccgtggagatgatgcacatggcagcaccccgctacgacatggaccgctttggcgtggtcttccgcgccagcccgcgccagtccgacgtcatgatcgtggccggcacactcaccaacaagatggccccagcgcttcgcaaggtaggcctcgtcccagccgcccagccgcccccagagtgagctgcgcacggaccccgcctctcttccaggtctacgaccagatgccggagccgcgctacgtggtctccatggggaggtgagtgcagggcggggggtctccagggacagacgtagcgtgagtgctggcctggccgtgccctgatggcgcttatcaaaagtgtcatctacattcagtgaaatcccacgtggtcccggcgctgcccttcagccgtctcggtgcctccaccctaggcagatgcgctggtgggcctctccccagaacgattcctcccatccacccccacgcagcagaccccacattccgcccagttctctgctttactcacacataagtgatgacaggtgctgtagatagttttataatctcagccttctcacttgccattagttttttttctttttttttttttttttgagacagagtcttgctctgtcaacccaggctggagtgcggtggaaccatctcggctcactgcaacctccgcctcccaggttcaagcaattttcctgcctcagcctcccaagtagctgggattacaggcatgcaccaccacacccagctaatttttgtatttttagtagagacggggttttaccatgttggccaggctggtcttgaactccctcaggtgatccgcctgcctcggcctcccaaagtgctgggattataggcataagccaccacgcctggccttgccctcattttttagtcatttccccgtaacattgaaaggtatttagtctcttaacattttaaaatatttatttatttacttaaagatggagtctagctctgtcgcccaggctggagtgcagtggcacgatctcagcccactacaacctccgcctcccaggttcaagcgattctcctgcctcagcctcccgagtagctgggattacaggcacctgccaccacacctggccaatttttgtatttttagtaaagaagaggtttcaccatgttggctaggatggtctcgatctcctgatctcgtgatccacccacctcagcctcccaaagttctgggattacaggcatgagccaccatgcctggccaatatttattatttttattttttagagacagagtctcactgagttgcccaggctggagtgcagtggtgcagtcatagctcactgcagccttgacctcctgggctcaagcggtcccccaaccttagcctctcagagtgctgggattacagatgtactccactgtgcctactttttaaaatttctgtagagatcaggtcttgataagtttacccttttaaagcgagcagttcagtggtttttaggccaccacctctaattccagaacattctcatcacccccaaatgaaatgctgtccccatcagcagtcactctgcatccccttccgagccccggtgcccacacctcccctccctgtctctgtggatgggcccgtcctggacatttcacagaaacaggatcacacgccgcatggccttctgtgtccggcgtctctcactgagcgcgacgtcctcaaggtgcatccgtgctgtggcctgtgtccgagcctcgtgccttttcttggctgaataatatcccactgtgtggacatattactaatctaattctaaacagttaattagaatattccagagttttcataaccgtctcccactgctgggcattcagggtatgtccatttttacggctgtgggaagcagtgctgggagtggagtctgtgtggtctcctggggtttccagctccctgccccgggtggaccccagcgcctcactgacagagccggaatcaggcgagggtgaggctcagccgccccatagacaggggctgggtgttggcactgtggctgtctgaagtggctttttgttgacacatgtgatctgacacatcccagccccgggaatcggtggtcaggagccccctcgggaggggagcacttttccccgagttatcagccacgtgtgagcttgcgccccactggtcccacagaggctctgggagcctgtgcgtgtttgctcattgcttctccgtgacaagttccagcctcgtaggtgcctggcctgcagttgaaggcgggtggggatggggcgaggcctcgtggagggagggtgggcaggcgggtcttcggcacactcccctcacggtgcctccccaacagctgcgccaacggaggaggctactaccactattcctactcggtggtgaggggctgcgaccgcatcgtgcccgtggacatctacatcccaggtagggccgggaccgcaccgcccacgagggagctggagacagggccagcgccacacggagcccggcggcccctgtgagggagtcccacacccccagcagacggcgggctcccccatcctatggatgggccgactcggagcgctgcctcttagtggagcctgtcccctgtgagaagtcggcgatgtattcaggcatcagagggatcagagggagcaggggaagctgagtggaattcctgacacacgcctggtttacagcagtttcatatggtcctacctggcacaaaccaaagacctgcagttagaaataccaagcgagaaggttcctgggggccaaggacactgtcccgcgccctcagccttacagaagggcacgcaggactccctgggacccggggtggccggatttggcaaatgaaaacgtgggaggcttagtttgactgtgaggttagggtgaatttgaccatcaggaaaactgttagtagtaattgtttagtacgagtatatcccaacaatatttgggctatactgacactaaaaagagcattggctgcatacctgaaattcacatcgcaccgggaacattctttatatctggtgatcccgtgggactcttgcacctcacgtggtcccacgagggccatccccccgggcgttcaccttgacagtggtccacggtaggcaggcttggaggtggcgctcatgtgggacaggggacagagtcctgttcttggccaccctgtgctgcgtgcggcattagctcatgcgcagagagcccagccctgagtcccgagtctgggggtttgggcaagcgagaggcacatcctggtgcctctcaaaagtggaggaacaggctctgactttggattccgcttccctggaaagggcgttgatttgttcagcgttctgcacggttcaggtcaccccgggggcagtggagagggcagcctgggcctccctgtgacttgacagcacagagaggtccatcctggggtcaggagctctgcccatgcccctggcgtcttcccctgcagtgcagaccaatggggcaagttgcgagtgtggactgtactcctccctccttgcagactgagctcctccctccctggggaccgcgctcctccctccctgcggactgtgctccctgtctggggactgcgctcctccctccttggggaccgtgctcctccctccctccctgcggaccgcgctcctccctccctggggaccgcgctcctccctccctgcggaccgcgctcggccctccctggggaccgcgcccctccctcccagcggaccgcgctcctccctccctggggacctcgctcctccctccctccctgcggactgtgctgctccctccctgcggactgtgcttctccctcccttggagcagcctggacttgccagagctctgccaggtggggcctggccgccctttcccaggccctgcagtggccttgtcctttctcacctgtttccactcctgctgtccccgttgggccctgggcttcgtcctcttgctcaagccctttgttctgaacctgcgtggcagccgggactgggggatccccagcaaagagctctggcttggggctcagaaagagggtcatcgggtcctcgtgggatgcccgggctctgggccacctcccctccctccgcccagcctccctgcctccatctccgtccagggcagccccgggccctgctccccactgctaagtgtgtctgctgagcgctggcccccattgagtcctgagggctggggccgggggccgggttagtgaggtcagcgtcttgtccgagaggtccctgtgacagcccgggatgagccacgggtggagggcagtggggccttgcccaggggaggaccccactcttcctgcagggacctcccctgcgccggctcccagtccctggcactgcgcccacccagggctgtcagcctccaccttcagaggccggcccgggaaacccttccaaagccgagccggctgcgctgtgcacgcggtcacgcgggctccggctgcgggaagcgagactgaggcaaggtccctgcaggctgcccacctacggccgaggccctgctctacggcatcctgcagctgcagaggaagatcaagcgggagcggaggctgcagatctggtaccgcaggtagcgccgccgccgccgccgccggagcctgtcgccgtcctgtccccagcctgcttgtgtcccgtgaggttgtcaataaacctgccctcgggctgccgcctcccagtgtggtgtgtgggtgaaaggagccggggacgtggggggatcacagaccccctgcggcgtgccgcccttgggctgggggcggttggagcagagccgggggcagagacgggcactgtgcctgccagcagggtcctttcccgctgctctgcgaagaccctggggtggacatcgtggcccaaagtcccgagcgtggaaggccgcacacccatccttcctgggagggccctgactcagtctccctctatgccctaaggcaggctgagcaaagcccgtctgagcctgccccggggttcagagtgtggcctgtggcctgcgtgtggacttgggcaggtcgccactgccctctggcccatttccaggcggtggcatgggctggttagctgagggctggggccagggagatggggaggtggcacctggtccaaaccaaagggctgcagggcaggactgtgagcctcacaggctgtctgaccccactttggggaccctctccacccagggctttcggggaaccctgactccaccccaccagccccttcatccgtcgaagtccaggcctcatcagggacgtgcattcattcagcaaacgtcccatcttcctgtgttcagcgccagatgccgccggtgctgggacctcgctctgcaggcccaccctgcatgcctgctgcacaccagggacagttctggggatcggcagttatgacgggccaggctgggatggggcccgggagactggggcgggggtggggaagaggcacccagcccagccgggtcaagcagcctggaagcaggacatgctggggtggggacagggcgtcagccagcggaacagcagccctgggccagagtgcagagcacaggagccggccttctctcagggcaaggaggtcagtggagggggcgagcaggacggccccaggaagatgggcgggctgcacacatgtggatgcagggggcaaagtgggaggcatggggtgaccagctgggcacaagggcacagacaggcaggacccgggatgttcctggggctgggcaggtggggctgcccctgcaatgggcccagcaggggcgatgcctcctgagaggaaaccacatctggaaatgggaggcttggggaacggggctgtcagcagccacgcccctcctggggcgggaggaggggagctcagggtgtgctggggcgggcagagaagtgggttcctgcctggggtgggcaaagatccttgtcccacccacaccccggccgtggtgctgccaccccctgagaccctgacctagttacccccttccctgaccccactgcaaagggtcaggtggctttcatctgaggaagggacatcgggcatcagctggagatgtctgctatgggcaagacagtggggggggcggggcggatcctggggccgctcagaaacctggaggggagtcacccacttttcctgtgtccatgggatgggcgggaggtgagggagcagccgctggaagtaacagtcgcacgctcactgccgactggccaagcccagcgccggcgtttacttcacctcagggaccctgcagtgggcagcagtgaccctcacagagaagctgggaaagctgctggtgacacacagctgggatcagccctgggctggtgggacccctcacagagaagccgggaaagcttctggtgacacacagctgggatcagcccagggctggtgcgacaccctggactcccggccaggaaggcacggaggagggcatgggtgtggccgggccggggtgggggctcagcctttggtcaccaggggcgtgatcatctgtgggaaggcgtagtagcggcagtcggccggtgggaccagcgccatcacctccgtacggatgttctccctccggaagccggcctccagcagcgcgggcacctgcgtctcctggtcggggatggcaccaggtcacctctgagggccatgggggtcacgtgcaccctggcgcccacccctcattgaagagtgtttacagatggcaaggcccgggtgggcggctgcagctcccgtgggcacgtggcagggcagccctggaagcccaggtgtgaacgggaatctccagctccccagtgcgggcagcagcttcccggctgtcctggaaccccagccccacactcgagccacccccgggcacctactccacagttctccagaccttgccagtgtggcgggtggagccaaagaatcacaccagaaaaagaacacaggccactagttcccattttggaagaaaagctgccccaggggccacaggcacccagccggctctcacaacagcagcccagggcaaccacatagagcccttctcagataggccgcctccaccaggcagagggaacagcgagacaagcactgctgaaccagcaaagacagccaggtggaggcagctggagggaggggaacacgcagggcttaggctgaaccacagggcactggggagccatgggaggttgttgagctggtgagggactttgatttccattttttttgtttttgttttgttgagatggagtctcggtctgttgcccaggctggagtacaacggtgcaatctcggctcacagcaacctccgcctcccatgttcaagtgattctcatgcctcagcctcccgagtagctggaattacaggcgcccgccaccacgcctggctaacttttgtatttttagtagagatgggattctgccatgttggccaggctaggctcaaactcctgggctcaagtgatccacccgccttggccttccgaagtgccgggatcacaggtgtgagccaccacgcccagcctgatttccattttttttttaaattttctttctttctttctttctttcttttttcttgagacagggtctggctctgttacccaggctggagtgcagtggttcgatctgggctcactgcaacctctgcccctggggcccaagcaatcctcctacctcagcctcccaagtagctgggagtacaggcacacgccaccacgcccagctagttttttgtattttttttttttaggaaagatgaggtcttgctctgtagcccaggctggtcttgaactcctaggctcaagcaatctgcccacctcggccttccacagtgctgggattatagacctgagccactgctcctggcagccactgcgccaggcaaaggactttgatttctaaatgaaccagcacagtccagcccacccagggggtcaggaagggaccctccccaggtagcaaggtggctccagcagccccttcccacccccatccaaggtcacttcctggagacccatggggaacttcaggtgggcgcacctcaaacatgatggtgatgtctgagtacttggacttcatcagctccccccaggaggtgaggttgcagtaggtgaggacgccccccggcttcagcaggcgaaaggcgtggttctgtggaaggggagtggccagtggtcaggacggaggtgggggtgtgggcagaggggcttccccgagggcctcccgcatcccagcaagtcagagagaaccaccttgatgaagttgaactggtgtgtgtgccaggtctcctccgagagtgggtacgtgtcgtacaggatccctgcacggagaacagaagcccacgcggtcagggccgggctcagcgcctcacccagcctcacccggctcatcccccagcgggtggaggtgcagtgagacggggccgtgggtagaggtggggctcccacacaggcttgagaaccccgagatcgcctccagggcccctccgtgagcatgcccatccccggtgctccgccatcccacagccaggcccacacccacttgggctctgtccccccagtgcacatcagagggacccccacaagcaaaggaggggctgcattggagctggggaggcccaccctgtgatacgtcccctcacccctcaccatcaaagtgaccgtcaggcagggtgggtgccacatcctcccacaggcctttcaaggggatgaccttgcagaggggaaaagaaaaagagaggacagggtagagaggtccccaggatctccccacctgcagaaagggagcggccagggggactcccgagagagaagaccacctcctccacctctgacagccccaggcccccaacccccaggaagcagtgccctcaccccaaggagtgggggtcctggagggcctgcgggcagaggggcaccttgtgtgtctgccgtggggcccagtcccggagccgctggaagacgccgtcattgcactcgatgatccaatgctcatcaatgggcgcctcctgcacctttgacgctgcgatggccatgccaaagcccacctccaggacccggccccctgggcagacacagggcgcctggcatcactaggtggggcgggcttaggaggctgcctggaggaggggcacagggcagggcagggctggggagactgcctggaggagggggcgcagggctgggctgggggtctgcctggaggggggcgtgcagagcagggctggagaggctgcctggaggagggggtgtggggcaatgctggggaggctgcctggaggagggggtgcggggcagggctggagaggctgccaggaggaggggatgcagggctggggaggctgtctggaagagggggtgcagagcagggctggggaggcttcctggaggagggggcacagggtagggcagggctgagctgggggtctgcttggaggagggggtgcagggctgaactaggctatgtgagtcacatttgccacaggacgggagggcaccctgggccagcatggacagaggcgggcggaacacagtagtcctgagcgggaacagcgtgggccctggccagcggccagagagaggatgaccagccagggaggccgaagacggccgcttttggggccaggcctgtggggaggcgagagccttggactttgagcccagcccacgctgtttgtcccgggtcccttatctctcgggttagttacttttctctccccctccctctatccgaaagttggatttgcaagagtggccaggcaagacctggacttgagactatctgggaggggaaggactggtccccagtgggccacacatgggccccccgctcaatcctgattggcactggacactggacgtgcccattttcagggtgggaacactgaggcccgacccctggacggggcctgtgtggggccagggagtcctttcttagcagcccttagcgtctgacgccaggcaggccagggccaccccggggacagctgtctccctgagctcagctttccgagtgctattcttagccgggcgagtcggggctgctctcccaggcaggcagaagggcagcctctccctggcacgaccccttcctcccgacctcagacagggagctggggacccggttccacccagtttcacccaggtctcacgtttgaggtccccatctggagagcggggggcctcactccccctggagaggaagtttctggtacttaggcggtgcctaacgtgtgcgggccccacgcctgccgcactccccgtgaacgcctccgtgtgcccccacctgcagccccacttcccaggcgaggagacagaggcgccccggcgggagggtgggctgcagagtccccgggtcggggcagccccggcctcagtttcccctgcgcccccgggggcggtgcaggccgggcgggggctacctttggaggaggcggcggcggccagcgcgtgcatatagggggtctcccagcgctccatcaccggcttgcccaggatgcgcaggtgcgtgtccgctgcgtcgtaggccgcgggcgccgccccccacgcggggctgcagttctcgccgggcgcgaagatgggggtcgcgctgggggcgctcatgctgcaggctggacggcgacccgacctcgatcgcgcgccgcccgggcccgctccctgcaggggcttgtgggccgggggcgggtccaacaggcccggggggcggacccgcgagaggacgcgcgcgcgcggctccgggagcggcctctagcggcggccacgcgagaggtggcgggagtggggtcggggccccggccgccccctccccaaggagcctcggtgccccctctgcggagcgggcaccgcagccccgcgcccggggacgcgaacctgcaggctggggactggaatccccgccttgccgcttacgcgccatagattcctcatctgtcagcaccgcagaaaggccccctcctcgctggggtgtgagaatctgaggatcttccaggcgctgttggaagtgctttaagtgtttaaaatcatttaatcttcagaagatgctacagtgagttctgtctttttttaatagagacggggtcttgctatgttgcccaggttggtctcaaactcctgggcgcaagcgatcctcccgcttcagcctcccaaagtgttgggattacaggcgtgagccaccgcgcccgccaggttctatgatgactgtcgtttttccttccttccttccttcctttcttttttgaaagcaagtttattaaggaataaaaatgaatggctactccatagagcagccgactgtcattttacagatgtggaaactgaggctttgagaagcaaagccggtggtctggtggccacgagggtggggacccagcattagagctctgatgcccccctttcatgagcccatgtcacacccccataggctgggggtcatctgagaccccgggtccctaatgggggattccgcccaaagacgcctccagttctggagaccaggactcaatcccagcagtgccctttcctccggcggccctgcagctggggtgtgcgggggtggaattaggcctcccccagcccagggtagccccttagggtcaagcacaccccccgcctgtttcctgggggcccccaagcccgctgcggtggcgtcctggctctgatagccggtttccttccccctctgaacgtggggccacagtcatgagccctgagcactgcctgcctgcctgcctgcctgcctgccgtgcgttctgcacgggttaacagatgcagttattatgcccatttaacacgagggaaactgaggcccagagaggttgaggttcacaggttgcagcagggccacggtgtgaacgcaggcagcctcggaaacagctcccgcgcgcggccttccctgcgccaccttgtctgggtagctgcctgccccatcactgcctgctcaacgcctccacatgcccctgccacctcttgcacagctccttagccccgggccttggcacacgctcttccccttgcccagacagcctctctcctggtcaggccgctttctcgttctgtctcaagctgagcccacgtgtcctctaggagacacccccattctgccccaggacaggcatgtcctggtcagaagctgttttgtttgtttttgtttttctgagacagagtctcactctgttgctcaggttggagtgcagtggcatgattttggctcagtgcaacctctgcctcccgggttcaagcgattctcctacctcagcctcctgggtagctgtgatgacaggcgcccgccaccaagcccggctaattttttttttttttttttttttttgtatttttagtagaaacggggtttcaccatgttagccaggatggtcttgatctcctgacctcgtgattcacccgcctcggcctcctaaagtgctgggattgcaaggtgtgagccaccgcacccacccggccagaagctgttttctctctctttggtagttcactaacggaaggtatttcttcatggtcctagcgtccctctcacagggctgtcagtgatcctggcacacagaacatgcttgataggctgggtgcagcagctcccacctgtgatcccagtgcctgggggaggtgcaggggctcaggcctgtgatcccaccactttgggatgccgaggtagaaggattgcttcagtgcaagagttaagaccagcttagaccacacacagagaccttgtctctacaaaaaaaaaaaagttttaaaaattagccagggccgggcgcggtggctcacgcgtgtaatcccagcactttgggaggctgaggtgggcggatcccctgagaccagcctggcaacacggtgaaaccccatgtctacaaaaatacaaaaatagctgggcgtggtggtgggtgcctgtaatcccagctactcaggaggctgaggcaggagaatcgcttgaacccgggaggcggaggttgcagagaacatcactctcagtgaaataagccagtcgcaacaggacaaatcctatgtgagtccactcctaggaggtccctggagtcctccgatccacagagacagaacgtaggatggcggggggggggggtgccaggggctggggaggggacagggagtgagtatttcacggggcagagtttcagtttgggaagatgagaaggttctggagaggacggcggtgatggttgcacaacaatgggaatgcgcttaatgccaatgagctgtgcacctacaaataattaaaatggggccgggcgtggcggctcacgcctgtcatcccagcactttgggaggccaaggcgggcagatcacctgaggtcaggagttcgagaccagcctcaacatggagaaaccccgtctctactaaaaatacaaaattagccgggcgtggtggtgcgtgcctgtagtcccggctattcgggaggctgaggcagaattacttgaacctgggaggcggaggttgtggtgagccgagatcgagccattgcactccagcctgggcaacaagagagaaactccatctcaaaataaataaataaaataaaaacaaaaataattaaaatggaaaattttatgtcacatatattttaccacaagaaaaaaaggggaccaaaactacataccgtgtgttggatctgtttatagtcacactgggagtaaattcagatcagtatctgcacagcctttttctcgctgcctttgccctggagtggaaggaaggaaatgaatggggaagagggagaagcggagaagtagcctcttctagttctttcttccttccttttttttctttttcttttcttttcttttttttgaggtggggtctcgcactgtagcccaggctggagtgcagtggcgcgatctcggctcactgcaacctgcacctctcatgatcaagcgattctcctgccccagcctcctgagtagctgggattacaggcatccgccaccacacctggcttttttttttttttttgagatggagtcttgcactgtcgcccaggctggagtgcaatggtgtgatctcggctcgctacaacctctgcctcccgggttcaagcgactctcctgcctcagccccctgagtagctgggattacaggcacccgccaccacgcctgcctaatttttgtatttttagtacagacagggtctcg[143 bp omitted]gacttccttctttgggccacattctgtgcatttcatccacccactgcttcattgttcatttatccagtcaccaatagatggatgtgtggttatttcaaatgttccagtcttgttttgttttgtttttgatagaaacagggtcttgccatgttggccaggctggtctcgaactcctgacctcaggtgacccgcccacctcggcctcccaaattgctgggatcacatgtgtgagccactgagcccagattttttttttttttttggcagggtttggctccgtggcccaggctggagtgcagtagtgcgatgtcggctcactgaaacctccaactcctgagctccagccatcctcctgcctcagcctccaagtagctaggactgcaggtgcgtgccaccaaacctggctgatttttgtattattattattattattattttttgtagagatggggttttgtcatgttggccaggctggtcttgaactcctgggctcaagcgatcctctcatctcagccttccaaggtgctgggattacaggcatgagccactgcatccggccagttttattttaaatggggttttagtcccagctacttgggaggctgaggagggaggatagctggagtccaggagttcaaggctgcagtgagctatgactgcatcattgcactccagcttgggcaacagagtgagagcctgtctcaaaataaaagaaaaaaaagtgttttgtactatttgtctgtgatcttgttccttgtattttttttttttgagacagagtcttgccgtgtcgcccaggctggagtgtagtggcacgatctcggctcactgcaagctctgcctcctgggttcaagcaattctactgcctcagcctcctgagtagctgggactacaggcgcctgccac[138 bp omitted]ctcggcccttttttttctaagagggagtcttgctctgttgcccaggttggtgtgcagtggcgcgatctcggctcactgcaacctctacttcctgccttcaagcatttctccggccttagctt[131 bp omitted]ggcctcccaaagtgttgggattataggcgtgcgccacctcacccggccttgttccttgtatttatttaattctgtgatgatgaataaaccaaacgatcaggctgtcaatgtgctgtgagattaaggagaaaagcagtaggcagcacgtacccggttttacaaaaccctgcgggtcacctgtttactaccgtcagcctagaccggtttttccacctccttctgctgacattggaggacgggtatcattctttttggggggtcgtcgtgtgcactgcagggtgctgagcggcatgtctggtctggacccactcgatgccagcagcaccccgcactcaagttgtgacaaccaaaaccgtgttttcagacattgccaagttatcccctagggggcaaagtcacccagaagaagaaccactgatgtatgcaattaacagatgcaactaaaacagtatttggctattaatagtaatagcacttggggggggggtcaataatatcttttcatagtcattgaatttagttaattgttttgatttgattccagttcagccccgaactgggtgaccttggccaagtgactcagcctctcggaccctcgggatcctcttctgtgaaatgcggacaggggaaggagcctcgcgcgggacgctcacgtgccgttcccgctccgtccgcccgcctggggtgcgggcgggtacactcccactccccgcagcgccccacgcggctccaccgcttccgagtgaagagttaaagaggaagcggcagccgcgcctgcgcccacagtgcctagcccggagcgccggtctcgcaagcgcgcacgcgcacgcaagcccgcacgcgcgcgcacgcacgcacgtggctcggcccgcgcgcatcctccccttgcaggggcggggccagcgcagggactccatttcccagcgtgccccgcggcaacgccaggagcctccgaggagaaaggaaaacgcgcgacggccccgactgcggcggcgcgaaatccgcctcagggacgcacgcacagacggagtacccctggacccgcccccggagaccccgtgcgggagcgcgcccgggcgtgcgcaggggcggcggcgcggcggcgcggggacgcgcggtgaccgttggcgccgaggggaggaggcagccgccgccgccgccgccgccgccgccgccgccgccgccgccgttgcgcagatccgggccgcggctgtggggagggcgacggagcgggtgaccttccggaggcgggagcgagcgaggaggcccgggagcgccgagcgtcgccgccgccgccgccatgaacaactcgggcgccgacgagatcgggtgaggacgagcggcgcgggcctgcgtctccgccccgagcccggcccgccgctccccgccgcccggcctcagacgccgccccccggggccgccccgtcaaggtcacgccggccgggggcggactcgggacccggactcgccgcggcttcgcgccgggggccctggacgggtgcccggggtctgggggggtcctggcgcccccgccgccgcttcccggcttcccgtcctgggggatcctgaaggagagcctgaggggtccggggggccccgccgccgcctccagacttcctggtcgggggaaccccgaacggcaacctgggggggtgtcctggggcgcccgtgccgccgcttcccgactgcgcgtcctgagggaccccgaatgggagccagaggggttcaggggcccccgccgccgcttcctggttgtggcggccccgaacgggaacttgggggggtctggagcgtccccgttgccgcctgtagggcttcctggcctgggggaccccgaatgagaacctgagggagtctgcggggagtccagggcgccgtcgccgccgcctcccggcttcctggccagggggaccccaaactgtggcgtggggggtggtccggggcgcccccagcgcgcgcccaaacttggcgggcggcgcacgtggcgagccgaggcgagggttccggttctgccaccgcccaacctatcccactcggggctccgggctccccgctcccatcccacccccccaaagtggtaaggtcgggaggggttcgcaaacccagggcccagggggctcgggtcagccggggcctgctgtgtttacgttgcctcggcgcctccccgccgggggtgggcttgagctgcggaagggagagtcagcgcttccgaggcggcgacgggcccgcggatctttgctgcgccgaggcgtcccctcctataggagcctgacctgctccggaccccgcggggccgggaaacctcatttcgctgtgccccagggctcggcgccattctttggtaggagcggctcctgccgcagcgacgtcgttttagagttgcattcttccggcaaaacagtctgggttgggtttcctagtggtctggtgtaaatttctcggtgcccttagctttgagcagcgccctgtgttctcagcgctgggcttggctagtgcgggagcggttgctgctagagggttgccttggcaggcgcctctcgcaccagctacaggtcacacttgtggatgggaaatgccttttgtgggctctccccctccccagacaaaacaaaagagcaccttccgttggagaaccaggatgaaagcacttagcccctgcctagcccgtgctgtgagtcctctccaggcactttgacttggcagggtccgtgtgcctgtgtgagggacattgcagggatgggcctgagcagggagtccaccggccatgggggatggagccatcgactttggggtgaggcagggaaagggctcccagatggggtacctggattaggtccattcaagccgcgggtgaacgtgggcccgctccacccaagccgtggctgtgaggaggctggagagaggtgagggctcctgtcccctccctgcatggacacccttgggaagtggggcagctggggtcccagcctgggtctggaggggtcccacccacagcacaaataggctcgcaggccacccggacgccacgggctgcgtggaggagaactggagtgcatggaccctgctctcctccccggctgccaggagtgtccactgctttctaagtcagactccttgggcaagaagtgttgccacagccgcccgtcgcatgggagaccggcttccattctatgcggagtccacggtctgctctgatcttgctgtgtggagttgttgtgtgcgtgaaatgcttgtgaccctgcgaagcgccctcctggcaagtcccctgcaggtgcggtgggtgccatgcaggagggtgctgagcttggatggaagcaggccctctctgcggcagatggcggctctcaggacgccatgggtctgcggtgtcccttacccactgggggggctcggcagcctgaggagctccctcttcctgatgcagagccctcactgctcactgccatggaggaggcaggagatcccgccggaccccgcttggagggctgggcctggagcatgcatgggtgcggggtcaacgcctcaggagacttggagcttgggagccccctgttctgggacacttgtggccgtccagctgctgccctgggaatccacacctggaaggtgggttagggagccatccttgggggaagctctgcttttgagtctgagaagtcgtcccaagttttgagggtccctgtgctggcttagaagtccatgtaaagcttgatgggggatgaaagtcagctgaggcctgccggtgataacggatgccttacacacaccgacttccagtcagcttgaggggggcttcatgcaggaggaagcgcatacgtgtggtggggtgtggggagtccctctctggatcctggtgggtttggcacgcggaccctacatggtggatgtgatggacagtgtcctcctttgggagcggggcctgtcctggtcctcttgtgaagggtgggggacaggcactgacctgtcaggagggttagagggttggcaccagcaggtggcctggagcgctcagagcacgcgcgatcaggaaggcccgagtctccagtgtgccctccctggccttgtgaagtcatcttaaagtctggcttgagcgcctctgacttggattctgggaagctgacacagcgcggccggggtcgccacatcctgttgagtagccgctgggtgctaggcgcctgggtggtagaccaggtgtcagggatagggcccatgcctggcctactggggagaggacagaggctcagaggggtcacctcgagcgcccaggccattgtgttctgctggcttccaaggcagcacacggtcatggaactggagagagaggtttatggaagattttatctggtacactggggaatggtaagacagggacacctggaaatattgtaggaaagtcacagagggaggaaggactcagcggagagaggagaaagccgcctctgggcagcttcgaggatacccaggactgtggccgggggccatgcagctcagagccaggcccatggcaggtctctgggtttattgggtggctgtggaaggagacatcctgagtggggctcctggctgggcccctagaggccgtgactacttgtacctgtgcagagtgagcacaaggcacctggcaagattgttggtcaggccagagagggccgtgatctgggggaggctgttgcagtgcggggagtgatagggaacctcatggggccgtgccggcctttctggggctctcttggtgcatttggagttattccgaggcaggtctcctgggctctgtcagcactctggcctggatcactctggggcaccgtgggcactgcagggtgctgggcagcacctttggcctccattcactccgggtcaggagtacccccagtcgtgacaaccacaaatgttcccagacatcacccagtgtcctgctggggggagagccactgtctgggagcatctgtgcttttggcctggttgcccctgcgctgggggccgctgctccttgtggtttatggcttgtcctgtgtcggctcctttgattcctgtgaatgggccttgagggtggatgtgctcctgactggctcgccttggctccaatggtctggagcaggccggtgtctagaaaggcagcagcatggaccctggcgcttgcccttcacacagcagctccccagtggcccagagctagcagcagcgcgcagcgtgcccagctgtgcttgtagccttggctctaacccttggctttgccagagagactgaggcacagaggagttgagggatgggcccggggtcaccccagggggtggaagatccggagctgggagtccacactcctccactgcccgccccgcacagagggcgctcctggtcaggcggctatgttcatggtgcgacccgtcaatctgaggttgtgctgtcttctgtgaactgaggccttttcccatccaggcctggtccccgtgacaccatgtcatgatgtcagaatccctgagagctgtgacagggcttttggcagaggccagtcattcgacagatgcttataggctgagcttccagcttggctccaggcgttgccaaggagaacactggtccgcctgggagggcggggctggcagggagaggatgagggtgaccacagttagcacccaggatgtgggcattcaggggctccttcagcacacagcagcgcgttccagttcacggaccgctcctgtgttctgtggaccccacaccctgcaggcgtgggctggagggggggcatctgaccctgctggggagagggagtccaggctatggaggggcgggctgggctcactggcctgaggcagtgggtgaagtggtcctggtttcccacctggtcttaggggcaggaaagtccctagaggctcttcctgatgctctggaagaagagaagggttccccacacatcagccgccactgggcctggacttctgcctcttgagattgtgcacggagctgagtgtgactggcggagcccagagccaggtggggtctgtggggaggcaggctcctcctggcttggtcccccggcccagcaggaagggaaaggtcgcctgccaactgcccccattgaggctgctggccccgaatggccgggctggccgccggtttttgaagcccactctggtgctgccaggaggtcagggctctttgtggtcagcctaggccagaggaagcctctgcagatggactttacgcataaataccgcacaggcacccgaatggcacgcagcaagcgaggttgccatccaaaacggcttttgctttaacaggcagaagagggtggctgcgccggccaccgtggattgagcacctgccaggtgtcgagctgcaggccctgggtgccaggcttgcagatcctgggagatgttcatcatgacctttgatgggcagactgcacgctggactccaggttgcaagggaagaagtggagctcgtcccacgcctcccccactaatgagaacaccccttttgggtttgtggggtgtgaggtctgtaggagccacgacttccagtgtcggagatgccgtcagctgggtgatgactctcccacccagcgggcccctcagaggcagggtgcaggagccacattgctcaccgaccccttcatctgcgtaggccagtgttgccttgccccgttaacgtcctcagtccacacgccgccagccaaggtgcaggctgagcaagcctggagctgaggacaagcggaccgccagccccgtagcaagcccacgagagccagcagctcctccttttggcctctgcccgcgcccggcttcctggactccgacgtttacttgtgtgagagttggttctgctgcctgggcagttgatggacagtgtctgggaggtgcctgcccagggctccgcatgtttctgatgtgccggcttctcactcacgacctggtgaggttggcagccaggagctttcttattttattgattaaaacatcctgagattcagaagtagggactttgtgccagggccctggaggcagtccctgccactgaagagatgaccctgctttccgggacttcccggaggcttctgtctgtagaccagggagaaggtgttcgccggtggctcctgagtggtagtaaaagacacatggacacaggaagctttagcgttagaagctgctctcaaatatctcaacagaaacacacagtgtggccgcgcgcggtgcctcacgcctgtcatcctagcactttgggaggccgaggcgggcgggtcacctgcggtggggagctccagacacagctatgtgaaacgaaagctatctgttgctgtctcagattccataaggactgagacttgtttcaaaagaaactgaaattctgtcttgttctcagtaatgaaagtcttttataccataattgtatatataacttctgacttacaggaaaattacaaaaattcccatatcctcttggccctgccagactcaccattggctgacattttaccctttggcacgtggtgcctcttgccccacccccagtgaactgtgtgtgtgtgtgtgtgtgtgtgtgtgtgtgtgtgtgtgtgtttagatggaccctcactctgtcgcccaggctggagtgcagtggcttgatcttggctcagtgcaacctccgcctcccgggttcaagcagtacacctcgagctcagcctcccgagtggctaggattacaggtgcgcaccaccgagcccagctaatttttgtatttttagtagagatggggttttgccatgttggccaggctggtctcgaactcctgacctcaggtgatccgcccacctcagccttgcaaagtgctgggattacaggcgtgagccagtgcacccatccccactgtgtgtgtttctactgaaatatttgagagtagctggagaccgatgcagtcccctttatgtgtacactgagatatctattgtttcccaagaacaatgacattctctcacatgaacacagcacagtgatcaaaattgagaaagtggccgggcgcagctactcacgcctgtcatcccagcactttgagaggc[134 bp omitted]gaatcgcttgaacccgggaggcggaggttgcagtgagctgagatcgcgccactacactccagcctgggcaacacagcgagacaatttttcaaaaaaaaattgagaaagtatttattattttttaaaattgtatttgagtattttttatttttttaattttatttaagagtattttttattttttttttaattttatttaagagatgagatctctgtcacccctgctggagtgcagtgacacaatcacggctcactgcagcctcgaccttgactcaaacgatccttctgcctcagcctcccaagtagctgggactacaggtgcctgccaccacctggagtctcgttacgttgcccaggctggtcttgaactcctggcctcccgtaatgctgtgattataggcgtgatctgcgcccagctgagaaagacagtactgataccaggttatctaacccccccggccctgtttcaggtttctcagctgagcgtttctagcccttcccccttaatacacaatttttgaaatttaaatgaagaccgaaactggactggtctgacgagttccttctgccagtgaggtgggggtggagggggtactgggctgcttggaggacacctgcctgttacctggctgttgggtgggtgcagtgctgactacaggctgctgtttcttcaagtgacttggatttggtttggttttcagggttttatgtgtgtgtgtgtgtgtgtgtgtgtgtgtgtgtgtgttttgtttttttttttttttttgagaactgcttgaactttaattccaaaggattgtgtaaatgagcatttttccggtcggttccagccaggcttgggggcccttccttcatggggtgggggctgctgctggctcctgctgggtgccgggccctgctggcagggatgtgggcggggctggccctgactcagcgcgggcacagcctatggagagtgaggcacagcctatggagagtgaggcacgcggaggcctcgctcctcccacggtctctaggcctgacctcaacgctccctggcctgattgcgaagggtgcgtgggagacgtaggattttaagttaatgaggcctcaacctaagcctgttgctgttgcgtgatcagcatggttttccctgaaatttgccttttcagatctcgtctctaagggtcaggaagcacagggcggctggcacaccccgcctctaattcttcccgcctcagccctccccaccgaagaacggggctggggggttgcttgttgacgttttgaagacggcagtgggtgcctttcctgtggtgggaacatgctttgtttttcacacactaaatttaaatcagtcgttcttagggaaaaaagaaggaacagggacaagctcctggcggttggctgtggcagacacttcaccaggggctgactcgcgggggctgagtgtacaggccccaggtggtggttgatgagaggtgatgagtgtgccagccaccttgcaggggtctttcctggcgagctggcaggagcagggaggagcacgttgctcctgctgctggtggggcagtaacgtgttcaacctgacagcgacgtttttgctgaaagccgaagccaagggtggtgtggttggccgtcagggatacagggccccgcgtgggaatggtgctttcagtgaggctggcaggattcttgcggctcaggtgggagctttggcctgcacggtgttttgctctctggagaccaagggtgatgatggtgctggcactgagtcacagctgagattcagctcagggacttcatttctgaatgcgtgtcctctttcccagggaaagcaggcaggatgggagagtcgccgatagaaccacctcttccctgcctcctgggcttgggggaagcttgaatgacatctaaggccccgtgcctgggtaagccttgtggtgtctcagacatgcccagtgggtgccatggctgactcaaggtggcacagtccccattgggagttggcacagtccccattgggagttggcacagccaaggccctggggccacctggagcggcagtgaggtggaaaggtgagtgggcccttgggcgtcgctgcagggtcgatggcggacgccttgggagagctccagctcttctgcccggaggagacagccccaggacgggggtggcgcgggtctttggtgggggcaggcaggaagtgccagtgctgagactgaatttcaggcccttctcatctgccaataagagacagccccagaatgggggtggcgcgggtttgtcgggggtaagtaagtggggccagtgctgagactggagcttcagggccttcaccttcatctgtgggcctctcgttagttcgtgagtgcaggctcattgggaggcttctgtctgtgtccccccacccccgccccaggctgtaattcagaggccgtgtggcataggcttctagtttactgtgcatcatttcagatgtagacttctacattctttttcctgattataaaatactcgcaaaagctgtaggaaagcgagcctgtgtcccacttggcagcagtgcaggtgagcgtggtgccgtcaccactggcctgtcccaggaactcatcgcccgccacgcatgaggtcagcgtgcggctctgtggcacggtcctctccccatggcaaggattgggatcatctttcatgtctgcagacagcatgggcgaggctgactcgccattgctgtgagctttgtatgccgtcacgtgcacaaggacgtttgcgtcagctgcttctgtggtttgaattaagacctcagcttggcttggatgggggcatttctaaggcgagcgctgtcttgatcctgaatgttttctcattgaatcgcaggaagctcttcgtgggcggtcttgactggagcacgacccaaggtaggtggggaaggggtgtcaggtgggtactgcagatgggctctaggacctcggccttcaagttgtgtctgcccgcctcttgctactgtcttggatattttaaagtccttttgacgttgttctgatttctgggcaggggacagagtaagtgtgtatttgctctgagactgttaatttggtatttccatcccaagttacagggaagacctcaggctgcaggttcctagctccgggctgaggtggcttgtggaggcagacagctgttgtctggaagtgcagagggctgggggctggccaggctgttactgagttcagaataggaggaaagagtgtgtagcaaagtcggcgctccttggccactgccagcattcagagttgtcttgtttgccttgccttaaacgttgccttcctggacgcctacaaagtcaggttgtaaccgctggccactgctgtgctcactggcagcccctgatttacgtgaggacctcaagtgtgtgttgggcagaattccccagcgcttcccgtacaccccccacccccagtgcagcatcgctcggtgcgtggctggtggactggaggagtgtgcgtgccggcagcactgccaggcacgtgcctaatgctctggccctgtgtgtttgtgttttcttcccgatttctgagcagagactctgcgcagctacttttcccaatatggagaagtcgtagattgtgttatcatgaaagataaaaccaccaaccagtctcgaggctttgggtttgtcaaatttaaagacccaaactgtgtggggacggtgctggccagcagaccgcacacgctagatggccgaaacgtaagtgcccttccgggagctcacacccgctctctgtctcccctgtccttcctctgcttcattttttcctggactctgaccgatgtttgcgttagagtatgtttgaacgtggggtcgattgggaaggattaagccttggtgctgaggctggatattgcaggaggatacagggtgaatggagccggcggggcggggcgggccgggctgctgtgccgtggctgctgttgtgctgacaccctctttcctagagaaacagcctcttattcacaaccagctgatttgaaatttcctgcagatcgaccccaagccatgcacaccccgggggatgcagccggagagaacacggccgaaggaaggatgggtaaggggctgggccgggcggcctccttgtgtgttctccactccacgtggaaaggaaatgcgtgccttcaatctgctgttgtcgctcgttaagattgagggcgacgcaggtcttctgggttggcactcgagcagctgaggatcacccagatttatcagtgccgtgagtgttttacagccaagaaaattcttactaatctatcttagggaaaaaaaaaatgacagctcatgccactgattatcaggagccagtcagcttccctctgtgccctgtgtgccctctgtgccgggcctgccccctcccactgcctggccctcctcagaggtgggccatccttccactgccggggctgggccgggctgtgtcagctcgtgctggccactttactgctccacttgagatcccctgacgtggcaacttgggttctctgacctgcgccctggtgcttgcctggccgacagggcactgtcctggcatggggtctccttggcatttgggtctcaccaccacccacacctcaccttcctccagccctgcagttctcacaccggcaccaggagcctggtggggcggtgcagatgggaaagctcttagccccatagaacgtgctggacagtgcagacctggaggcctgctgaggcaccgggtgccagcctctccacagtgtgggcagcagggtggggtctatatgtatttacatccatctctgtccacatacaccattcctaaggaccggagggtgcgtctcctaaaatgacggccacccctcgcatgcacccaccgtcagcacgctggaaagcggctgcagggaatcccgtgtcatctgtgtccaggccgtgttcccagctccagaattgtttcacaagtgtctctcatagctggtttttttcagactggaatccaaggttcatattccatctggttattaatgtctctctagcttttcttaagatataatgggcacgtagtaaactgcaccacttgatgattctgacccatacaaacactcatgaaaccatcccgaccgtcacggcagcgagcactcaccccacgcacacactcatgaaaccatcccaaccgtcacggcagcgagcactcaccccacgcacacactcgtgaaaccatcccgaccgtcacggcagcgagcactcaccccacgcacacactcatgaaaccatcccgatcgtcaacggcagcgagcactcaccccacgcgcacactcatgaaaccatccctacagtcacggcggcgagcactcaccccacgcgcacactcatgaaaccatccctacagtcacggcggcgagcactcaccccacgcgcacactcatgaaaccatccctacagtcacggcagcgagcactcaccccacgcgcacactcatgaaaccatcccgaacgtcacggcggcgagcactcaccccacgcgcacactcatgaaaccaccccgaacgtcacggcggcgagcactcaccccacgcgcacactcatgaaaccaccccgaacgtcacggcggcgagcactcaccccacgcgcacactcatgaaaccaccccgaacgtcacggcggcgagcactcaccccacgcgcacactcatgaaaccaccccgaacgtcacggcggcgagcactcaccccacgcgcacactcatgaaaccatcccgaccgtcacggcggcgagcactcaccctcaaaggtttatagtcttttattcaaagcagttggaacaacttaaaatgtgatagccttggatagggaaaaaaaaaaaaaaggatggttggtgggtgggggcaggaggagagcagccccagccctaagggcagcccgggagctggaccagagactcctggctctggccacccagtgagcgccgaggccccgggaagtggtgcccaggagcaggcgcccttgccagtgggaggccggcagaaggggctgtgtggtttgggccagtgtttcacacagctcttgagctgctggaggtttccgtagccatcattgtcacctgctggagatgtacagcctgaaatccagcttcctctctgctcatttcgtcgtcgctgctgcctttcccctgccgtcctaaagtccctgccttcacactggagcacttttccacgtggcagtggttgtaattcggaatagctgaggcaaggcacgcactgtgtcgtgggtccgtttagctgaaatgtagctctgcagaaatgctcaatccctgtctccttgggtctctctagaaaagtgagaaagtgtctcagcagagcccagtgtctttggacttagcgggcttgtggagtgttctgctctggctttcagctgactctttaaaccagcgcggattggcctttatgtcctccgcagctcgcgggagggtttggagggttcccgtgtgaactaactatccttcccttcttcaacagcagaaaggacccaggagcgataacagtaaatcaaataagatatttgtcggtggaattcctcacaattgtggtgagacagagctcagggaatacttcaagaagttcggagtggtgagtttctccccaccccggcagcactgtggggacagagccgcttctgctcaggcctgggccttcttggggctggagtggccgagccacaggtgcacgggcctttcaggctgggagctcgctgtctcgtatttccccaacgcctgcgccctccggaaaggtggaaagcccggcctttgccttcatggccatttcgtgtcccagtagggtggttgggcggtgaaccagcctgacagccttcagggcggccgcccgattccattgtgaacaccgtggggtccagtgtcagagaagggcagttacacagaaacggggttcagtgtggcctgggcgagccagccccacagagctgactttccactgggcaggtgggagaatgcccgagctccgttgagcccagtgccagagggagctgggacagccggagggggccggcggggagccctcctagtcacccaaggcaggggcgtgtggtcaccccaaggtcctgctgggactcctgccgtgccccgcaggtcacactccgagccccgccagcaggacagccctgcgtgcctgagtactgcgcacgttcatcaggtggtacctgagggtgccacgggcctgggccaggaatgagaggcctgagcggggcctggaagagcagggtctgcagaggagctgtgtgtggctgccccgccacttcgagtgagggccgagcgtgccctttgcttcccgcgtttgggtgggaagggcttctgtggggtctcctggctcccacgtcccctgctaggatgcgtggtcggcgttgttggcccttcatgtccgtcagcacacacgtgagcggggccacgggcagcccggaggcgggtatccagacgcctgccctggagctgcttctccctgcctgcgtctggccctgggagtgttggggctccagcctttctcagacagcagccccacggagcagctgttgcccgtgcacctcccccgctcagggagggcgcaccctgtgcgagagtttgggttcgtgggaacaggctgtgccctcggaagaccacctgtggtgctggccctggtgtccgtgctgacgccaccctctccttccaggtcacggaggtagtcatgatctatgacgccgagaagcagaggccccgaggtaagggcagatctagtttgacctcggccttctccctgctcctccctcagatggcaaactatctcacccgccaggcacacacaggtggcggctgtagcaaacagcctcaggaagggacgatttggagacaaatgactaaaacgtgggctcctcatgtgcaccccattcagcctgtctgtgcttcccgaggtcagacgtcacacattgttttttggcttgttcttttgaagtttttacgacttgtcatgagtctcggcctggcttctgtttttcactgtccggaagagtgtggtccttctgcatttgaccttccttcaccctcatccagtcctcccagtgtggccggtctcatttcgtgtcgtcagctgggtcagctggctcggtgtggagtttggattttccgtgatccatcccatgctttttttttctttctttcttttttccttttcttttctttttcttttttttcagttttctcccctctctgaagtcagcagggcaggtgggaggaggggtgaggagtcacctcagggcctcccctcattttccctcagcttcttgcacacccatccatgctggtttgtggagctgggacgatgggcgcccagtttctgtgccccttttccgtggctgctgctgtctgtcccgcccgcccgcatggttttggttcatcagctgcttttggccggccacgtgagcagacctgcagcctgggtctgcccgccacgtccgtgccgcccccgcaccaccggcccaggtcagtcggggcagccccgagcgccaggtggcgccgcagcatgcccaccatgctggagcatagtttgccatttgaacctccctccccacggttaggagtgctcctcctccatgtcggttacgctgttaagtcttagtcgtaacttaatttagacatacatgcttagtgacgtacttaagtgtttcatagtaaagtacagtgatgttaagtaagctgtttttccttttctctctgtgaattgtgtgtgattaacgatatctctttagatttctcttctccaggtgctaaattatatcacacaggtacaggccagtcccgcagtcagaggagggagcggctttgctccagtggggtgtaaacgaagtttcaggtgtttctgtcccgcttcctcagtggtgatgtcgcctcttgacagccgcattcctagacagcgctcagggcgcctcccccaggacccagcgcctcttgcactgtgcccggaccaggcgagccctgtggtttcagacactcctgcagtttgcgaaaatgtctacttctaaatacgttgtttcatcaccgatgctgtgttccaatactgcctctgatcttgggaaacttgagcgcgcgggaatctgagggttgcttctagatcctcccggtccccctccggctgcccagagctggcgccccttctcctcgcgtcctgtcctgtcccgtgtggacgggacgtggcgagtgtcgctgagtccacactggtgtacagagcacttcggggccagcacgtggccacatgtccttagctgttgggctttgaaagtgtcccttgggtgtcaggcgagtggagggccggagagacgctgcggcgctgcttagcgggtcctcccagagagtgtgtccccttcccttggcctttctgcatcttctgagacgggtctgtgtccccctccccgccacctcctccctcttcctctccactgactgaaggtcatggccatgtccctgtcagggaccccgcctgtgtctcgggcacacagtgtctgtgcgggtccctgcttggccctcccacgtctaccctcggcccgcccgctccagccgctgcctcgttcgcctctcagtcccctcaggtcttctccatcctgcgctcctctcgctgtgtgccttgccttcctggtccctcctcctcttcctcctcctcttccccctccccctcctcctccccctccccctcccccctccccctccgtctggttgcagacactgcgtgcacagtcacgctcaggtgcacacgtgtgctcaggacggtgggaggctcctgaaccacagtgacctttgtcccctcacagtctgagctgccctttctgccccgtttccatctttccccgcccccagttttgcttgtcctgtttctgcctggtcccagctacagcagccctggcccctgtctcttcagcttgagaggccccacagtaggctgctccttccgggggccgttgcctgttcccaccccccacggcccttctctgccgcgctcgttcacgcctcacgcccgtgctgcgctgtcccctgctgtgtggtgccttgtcacgcaccctgtgcctctggcgcgggcagcccatcttcagcccggtctcagctcttcccatgtccatctttgttctgtgaggtcttgggcagctgtctgccgggcacttccatctggggaggggctggtgccgcctgggccccgcctcgggaggacggtgtgctttgcggtgtcacgctccacctagccggggaggcctggagagcccggcgcactcctgcgcctagaggaggagacccgccccgttagccgggggccgcgcccaccccagacccactaaacttcgtttatactgccactcttgtgtttgggaaatgctaaattttttttgcctttaaaattttctgttttgatcccatggtgcatctcgctcttgctgctggcagcagagtctgacctgctggaacccgttgtggcctgtatctttgtgcattgtttctctacctgtatagaacatgcatagatgtctacgatatgacctcttctaggactccttgggcttacccaacggtgttgcgtaagcctagcgaggcaccagctatgatagatactgtatctgttaacgctttagaacgatatatggctgctgtcagcactagctgcaaagcaaattgcaagccaagggggagaatcctgggtttcagagaagcatacacacatccacggtgcacacccctgactaagatggcgcattccacgcgggcccccggcctgcagggttcactggcaatctccccacaggcgagagccagaatattcaagcacgggcctctgaccctcccctggggggcgctttgtctgccagtagcgatggaggccctcaccgttcccctgtctccgctgctgttttataagatgtgctccttgttccaaatctttgtgacacggagccccagcccggggtgtctggggcggaggcttgactcaggcctcagtcagcagagccgtcaccgggagtgcggacgtcaccgtctgtccactccgtgtgcagtcgagtggtggctcctggggagggaggcagctgccccaggggcccgcagcgccccacacacagcttagctgaaacccaaggtcgatccctcggcccgtccctaatactgttcatcatcctgttttgtgtcacaacaccctgctaccttgattcactcttcgtcgttggctaggttttggatttattactttcgaggacgaacaatcagtggaccaggctgtcaacatgcattttcacgacatcatgggcaaaaaagtgtgtagttgtagttttattttaccttaagaccaaaccaagtcttaggcaacttaggggtttcactggaaaggaacattccttcacggaaagggtcgggcgagttcgtcctgtgaacctttgctgcgtgaggtgggcctgggtctgtagacgtgaggagggtcccatccttccccagcacccttcctgcggggtggggatctctcagctttgctcctggagcccctccctctgggtgacctgggactgggcgggtagggggctggggctgggaggctgtggcggtgttggggctggctccagtgaaaccgcagcgttgcctcaggcttggtttccacgaccactccttcagatgtctgcaaatccccattgtctgacactgacctgtaatgtgatcagcaagggacctttgagagccgaggttccgcttaaaatggaaagcacagtggaaacatcatgaaggactggttgtttgaattgggtcacttactgtggaactccggcaccagccacatgctctcggtagtactcagccaccatgcagtcaagtgacctctggttgtgtcatcttcatactgtgttacccccggaggtgagagggacaggaggccacccccccaacccccaggccagcccttggaaggcatgtgtcagaaaggggtccctaaatccttgttttacctggacccttggaggttcttgagaagtggactctgaaataaataactggtagaaattctacagtgtggaatttcttgcagttagcaaaagcttaggggtccaggtttttgcaggattcctgtcttggtcctttcaaaccaaggagctctgctggctctgccaggccgcctcacatgcccagtgggattctgacccggcctccttggtgcggcagcttctcccgttaacggaagaagacgcttagcccctctgacagggccatggttgttttttcaattaaaatgtcctggagggagcatcgtgctcattatctcctgcccctgccctctaccccagccagaggtcttgatagcagaacttttttaaaaacagtagcatgtgtagttatttttgtatacacgtggcttagattgggttgcagacttcattaattccatttgaacccaactaaaacaggagacacaatccttgttctgacatcgagtgcagcttgtggtttaaaatgagcctgccggctgcatgggtgcgcgacagtacaagcagggcttcaaggagtctgcgcccagtgttttaagggactacgacactgacaatttggggaaagcgtggtcttgatatacggggcagaaagagctctgtacagtgcacacacctgctgccgtccctgggcagcccctgggtccccccagccatgactgttctgcgcgagctcctgagctgggcgacctcagtgtgggtctcgccttccaagccagacagtcgttggagtccagcttgcccggcgccggccttcactggttggctggagcggcacttggcgtcgccgccggcccctcatgggggttttccgtttgtggagtgtttggtaccgcgtggtagttaaccctccatgccaggcgactgcattgctgcattcaggtaggaaagggtgaaagaatttttttttgtttttgtttttttaaagtacaaggaccgctctgctttgtaagcaggaaccgcagtcccctgaggagggtgtgtgaagactcgctcatttgagttctttgaaatgggtcccttggtcctgctgtcacattgccttgagctaacggatcctgttcccatcataggccggtccttggggcattgggcaggtgggggctttgtgcctctgtggctgctgctgtctgttctctaacaggcagaactgagggattctgaactcaggatgtgcagctctccagactgagaccccaaggctgactccaggtggatccattgtctctttattctcattacgatttatcagaaaagtgagacaaattcaggattctcaaatgctgaggcagccccggaattggggggatctttctgttgttagtccacccatattttcaagcaggcattaaaggaaggtcagccactgcgcctagaataagtaggtcaggcctgctccatccattgtccccggccccgcaccctcctcctgagaagactgtggctcctgacacgtctagagaggaagggccccgggctgctgagcgaacacagtatgaagattgcttactgatccaaatgtccattttattgcatgtttgttactttttttgttagatgtaatgtaagattctcttatcacatccattccctctgacattagttttgagttaattgagattctttaagcgttagcctggggaaggtaagtctttatcttccattagacattttaaatttaaaaatctaagtaaaacaccagccgtgtttctcaggtatgagttaaaagcacaggtgggcgggctccaagcagtccagagggcgatgaggatgccgattgctgggaagatcctggtccctttttgtccccatgttttcaagaggaaggaggacgctgccattttacttgagtgaaagacccttcgtcacgcacgaaacccccgagggctctgggctcggtcctgctgccccgcagtgggcgggctctgtgtgtcttacggttgcatctgttgtacctgagaaacattttttaaacaaaaaaattcaacacaaaagaattttttaagaaaaaaatgctactggcctaaataaggtttatagttaagtatttagtcttaagttgtaagatgctaagtgtagtcataagttacccgagggtgtgtctaaagggaagggggtgctgggacccgcagcctcgccctaaaccagagctcggtttgtttaggtggaagttaaacgagctgagcctcgggacagcaagagccaagcgccgggacagccaggtgccagccagtgggggagccgggttgtgcccaacgctgccaatggctgggcaggccagcccccgcccacgtggcagcaaggatatggcccgcaaggtaaggctgatgcagaggtgcccacgggaatgtcccccttctcggacttggcccgcgcgccctgggctgtgccgtcgctgcggcctccccacctctgctgtgcatgcacagagccgcggttcacagtgtccttgagcccccgcgaggtgccggctgacagccagctcccgggcagcacccgcagcctcctcagtagcggggtggccacggcttaggtgcccgtccggggcctgggactcattgtcaccgggaagagctgcagtgagcgtctgcacctcgcgaccgtgtgccacggcaggtctgagcacgaaaccctgagagggctggcattgccaagctgagctcagaatcggggtgctgcccctggggggcttgaggagccggcaggctttggatccttgccacctgccgttccctctgcagtgccgtgggccctctgtagttaggcccacgttgtgggccgtccttggagcttccagcagccacggaacccctgggcttggctgcagcccgacccgagttgtgggtcagggttccagatgtacgtcgtccgggtcccgagactgtggcttccctgcacctcgtctaaaacctttttctctggagcctcccttgttggaaactcggaggtgctgtggggactgtccctgccctctcgaggcttagaagtctcaggtttctctggggtcctcaggtggagccgggaggtcacccgtgccccagtcagcagacacagtgcccgccacctggcagggcacagaggagagtggctttaaggcctgttctacaaggggtggggagtgcttctctgctcagggttcagagggctctgccctcaggacgaacaggctctaagcacaggaggctccggggttggtcccagcccttgacgtccatgctctgcggctccttctctgcgtcggacagctggtggacacggcgccaacctcctcttctgttctcttatctaggaatgtgggtgccggcaggacaggcgattggtaagtccttgtttatagagcaaaggcggggacagaagccacatggcaggctgactcgccaggtgtcctggggcagccggcaaagcctggttcccgtgtcctgagtgctggagaggaagagagggtgaggggcctgctagggcccctggcaggcctgggtctaactgtggccagtctgtgttgtccagcgctctctgtccatcacccccgtactgtgtgtttcaggtggctatggaccgccccctgcaggaagaggagcccccccgccacccccaccgttcacctcctacatcgtgtccacccctcctggaggctttccccctccccagggcttccctcagggctacggtgccccgccacagttcagtaagtctagggggccttgtgggagggcctcccgcctgctccggagatgccaggtggtgggcggggtgatggggagtcttgtgttacacgtctggcctcagccacaggtggggtgccggctggtcagcaggtcacctgccaccaggcccttcacctgcagatgggctccatcgcctgtggcctcgctggttaggctaaagggcagcccgggctcctgcgggttggagagctcatagcaggaatgtctgggcccaaccagttctcacaggctcctcaggagacagagcctggacttcgtgtcttagcctcatacttcaggattaggggggcatttgtttaagggtgtacaagctctaattgttttttttttttttttgagatggagtttcactctgtagcccaggctggagtgcagtggcgcaatcgcggctcactgcaagctccgcctcctgggttcacaccattctcctgcctc[218 bp omitted]acgtcacttgtaattgaaaagctgagtgtaagatcagccgacacacccagagttttattttattttatttatttatttatggtttttttttgagatggagtctcactctgtcgcccaggctagagtgcagtggcgccatctcggcttactgcaagctccacctcctgggttcacgccattctcctacctcagtctcctgagtagctgggactacaggcgcccaccaccacgcc[131 bp omitted]cgcccggactattttatttatttttttgagatggagtttcacttttgttgcccaggattgagtgcagtgccccgatcttggctcactacaacctctgcctcctgggttcaagcgactctcctgcctcagtgtcctgagtagctgggattacaggcgtctgccaccacgcccggctaattttgtatttttagtagagaacaggtttcactatgttggtcaggctggtcttgaactcctgacctcagcgcatccagaattttagacggggcccccagggtgaggtcttggcaccctccagtagagaagaagggacatgggccatacgtggggtgtcctttctgggagccttgcgtcccttacctgcctagccagggattgcacctcacagcacgcagccagcaggaacggcaccgtgatctgatttcacctgcgggccctgggccctgggggtgtttgacaattggggcatatcacagtgtgagctagtcccgtctcgggggtttggaggctccacgtggccgtggtacaggagcaggcagttccatcctctggcctggatcaggctctgcacacggaggcctgtgggccagatgactgacaggaggggagttgggtggaacctcggcctgcctgatatccagcaacagagggcaagggcggcagcacctccagcatgacagtcccttccaagcacgtcaggatgctcccttgcctgtgctggcagcttcctaaacatggggactgggcatggtggcaggtttttgtccttctgaaagagcaattttgctgtgaggttacttgctccttgagttcttgtctgaggcccacctggcggctgctccgtgaggaacgaggtggccctgctgcagctcagcatcccgccacgctcccaggagtgtgtgtttcctggggggagcggcccgggaccgtggctctgtggtccattctgtggatgtccacaaggcctgggcgttctgtgggtttgggtggcagtcccgtctgggcagctcctgctgggctgggtgtgggtctcctgctggtctgcccccagctgcacaacgtgtcttgtgccttgccctcttgtacctctgcaggttttggctacgggcctccacctccaccgccagatcagtttgcccctccgggggttcctcctccaccagccactcccggggcagcacctctggctttcccaccgcctccgtctcaggctgccccggacatgagcaagcccccgacagctcagccagacttcccctatggtcagtatggtaagtggtctcctgccatgccgcgtccccgctggccccaggaccctgggcacggcctgccttcttctgcttcctcccctgctggacgctccccagcctttacctggtgggaaaggggagagggaggagaggggggtgtgggggttgttggagagatctcgtggcaactcgggtccagcagaagggagcgtgggagtcttgtcgcagcagagcactcgtcatacagcaggtgctgcagggcctgcatgtgtgggaacctgagtggcgactgggtcgagggaagtgagtcgcaggcagctgtgatcactgtctagaggttcaggccctcggtgtgggtcccgggtgcactggccccttggtgggttccagtttctggcgtcatcagcctcctgctgggtccagaccccgcttggggcagaagctgggtctgtagtaggcgtggcctggacgtgggcttcaccctggactggatggctgtcgtggcttgggtctgcctggacgtgatctgcaggcagcgcatgtgcttccggggcaggagcttgtgggggggcggggtcagcatgggtcaaggtctgcatgtcagtagttctcgccctgcactgagccaggagtcacagcagccttgctcaggaccaacgcggtggcctcagtgggcagggctccaactacggtcagctcctccagcaccaggggtcattcacaagcagggtttgagaacatggggcacctgtctgcaggtggccacgggcttccggggtgcctgtgaacacgcttcctctaggcctggtggaggccggggtgtgggagctgtgttcggccgaggtgcccgcccacccacctcgcatggctgtggttcccctgcccccacgcccaggccttgggccgaggttgccgcatgtgtgggttcttgacccactcaccaccaaaccctggcgtgtctgagactggcaggggggtgtgaggcgcccggttggggcgtggcgtgtgtcagccgctgctcttggtggcggctgcttgggttggtcaccctggtctcgtctcttgccaggcctgggttcctattctccagccccgccgggctgcggcccacactttgtttacagtcttatggtcaggctgagcagtgatgtggcctaggtaggtgccgcctccttctccagggtcctcccacccgcctgcaccgggaggtggacgtggcttcctctgccgtcccgggcgggggtggacgctggcggtgccctctgggaaggggcccttgccggtgccaagacattggccacaagccttcagcgggcccaggatcccccagagagagcccacgcccacctgtgcccacgtgcacccgaatgggaacccagaggtcgtgggaggggcttcctgcaaggtgtgcagcggggtggggagcggcgtgagcagctctgtccttgtaaagacaccgctgtccatgctcctgaggtcggctgtgtgggccggacgggctgcagggtgtgctggcccctcagccagtggtgtcactggggcagtcaggttgggcccagaaacccttccctgacacgtgccaccgatggacgtgccctgacaggaaggacaacgtggggtctggtctgcgacggaggggcaggccctgtatcgctgcaagggcccgtcaggggttttctgaaactccgagagccagctttctagaagcctggtccaccgtgccttgggccatgtgtgtctccaagccccgaggcttctctacctcccctcacccccccaaccacgtcttcgggattgaacagggaagcggtgaggttacgtgggccatggagggctctggaagccgcttttctctgtgtgtgcccctgctcacatgtttttgagggagagaacatgcccggggtcctctccccggcccaggtgctggcctcagaagggccccacccgcaccccgtgggacccgtggactcaaggcaggctcggcggagctgtgtccaggtggcctcgctcgacggcagtgccaaccgcccagggaccgccccgagctcacaggactttctcccccagcaggttacgggcaggacttgagtggcttcggacagggcttctcagaccccagccagcagcctccttcctacgggggtccctccgtgccagggtcggggggcccccccgccggcggcagcggctttggacgagggcagaaccacaacgtgcaagggttccacccctaccgacgctagcccgcggcgccgcgacgtctgcacggcccagacccaggattccaaacttgtgaactcgtgacaatcacaaacttggcggcaaagtggcgactcaaccttgggggggggggcggggggagggcgcgaggcttttggagcggctgtgggtgtcgtctggactgaggtttttaaatatttctttctctaacccatcagcacaataaaaaaaagtcactggttcaacaacagggtttaaaaaaaatgtcttcagctttaattcaaaacttcaggtttctttttcttccttttttttggaaattattttcctgagccttttgttttacggtatattgtaaacttttatgttaaagaaaaaatatacatttacaaattgtgagatttttaagagaaattttctacgatgtatactggcttattttttaatttaaaacggggtttccgtcggcactggtggagggggtgcgctgttagtcccctcgctcctggctttgggggttgggacttggtggtccagaaactctgggagcttctagaagaaatctactgagtgtatttctgttttttgtttaattccttgcttttgtcgactgacctgcttggtagtgtctgaggtgaactgtgggggttgcgcacagccagccgcgtggatcccacgcagcgctgaaccgaaccgagtaggaagcctttctccccaggcacgtggcttcagggcgtttcccattgaccagtttgaccctggtttgaataaagagaagtgcgtttggattagaaaccactttgtgtccgttttttccctccttggtcttggcctgtgcctacccttccagtgcctaggaaaggtctgaaacgcgacggaggcgccctcgccctccccttggctcttggtggtctcagcaaccccgagggcttcagggcagaggctgagtggcgagctgggcccatccctcagtgggtcttgggatgctgtgactttgaggatgtggccaccaccagttttctcggggaatgtgggctccaggcttttcccatctcaagacctttaatcatatcttttgccatggaaggtgacatatccccaggttctggggattaggacaggggcatctttggaaagggatactctgtcac[134 bp omitted]accccgtctctactaaaaatacaaaaattaaccgggtgtggtggtgcatgcctgtaatcccagctacttgggaggctgaggcagaagaatcgcttgaacctgggaggcggagcttgcagtgagccgagattgcgccattgcactccagcctgggcaacaagagcgaaactccgtctcaaaaaacaaaacaagaaaaaaaaaggaccatgaagtcccaaactggaagcctacagcgtgccaggcgtgagactgttcaggcgacagccagaaccacccccccccgccccagttcatattttggggacagggaaggtttgacttagtttggagagaaccaagagaaggggtacccccaacatccctgtgcagtgcagtttcctcactgagacagtacccctcaacgcctcagcccaggaagccagctccattccctgccgtcagagccttctcccatgtcctcaggagctgctgccccagctcccaggagggccaggcgggggcggctgtctatccacaccacaggtcatcatggtgttgagtgtcagcccctcccgttacattagctcccccagccaaagagcagcactcacaaaatcagctttccagccaggacactctgctgcaggaaaatgggtaacatggacgggcccgacacataggtcctgtgctcctcgggacggagactcagccctccctgagtacagtgtaattggcttcccttgggactgtggggacggctggggagagctcagctccctggacagtgccacagctaagctcgggttcccagaggttttgtgctttttttttttctttttcttttttttttttttttttttttttgagaaggagtctctgtcgcccaggctggagtgcagtggtgcgatctcagctcactgcaacctccgcctcccgggttcaagcggttctcctgcctcagcctcccaaggagctgggattacaggcacccaccaccacgcctggctaattttttgtatttttagtagagttagggttggtcagcttggtcttgaactcttgacctcaggtgatccgcccgcctcggcctcccaaagtgctggaattacaagcataagccaccacgcccagccaggtgccacatccatagttaatagtcaccttcaa[140 bp omitted]ccaacatggagaaaccgtgtctttactaaaaatacaaaattagccgggcacggtaacaggtgcctgtaatcccagctacttgggaggctgaggcaggagaatcgcttgaacccaggaggcagaggttgcagtgagccgagatcacaccactgcactccagccagggcaacaagagtgaaactctgtctcaaaaaaaaaaaaaagtcactcctacatagttctagttactccttctctttgagctatcattattcacattacatttacatatcttaacaaacccagtgatattcctaactttatttttgaggcagggtcttgctctgtcgcccaggctggagtgccgttggcgcgatcacggctcactgcagccttgacctcctgggctgaaggctcagcctcccgagtagctgggaattttttgtactttttattcttttatgtccgtgtgtacacaaatttttgtatttttttgtagagaggcagtctcactgtgttgtccttactaactttatatacaaaattttatctgttaaagccggaatggttcttttcagcgaggccctgtccctgctccagtatctgtaatgaattctcgtgttcctcccacagtgggacctgaaccgccaaaccgcacctacgagcaaacggtaggcgctccataaatacttgttgatgtgggtgccatcgtgtagatgacggagcacgaacccgaggctcagacaggggcggcgacttgtccaaagtcccactccgtggaggaagcggctctgcagacctcaggcggcggctgctctaatccctgcagcctgtgttttgccctccagacggcagagggcgcgtgttcgccgccgggaaagcggaagcgcgtgtgcgcgcacggccgagggggcgggacatgccggcagtctcgcgataactgcgcaggcgcggaccaaagcgatctcttctgaggatccggcaagatggtgagtgttgcgatttggcgcgtctctgccgggcctatccggctccatccaacctctgaccgtctcgcgggggccgcagttcgtccccgcggctacggcggcttgctcccgaccctgcaggcggctggatgttggggcgaggggcggacttggtgggtgtcgggacgacgcggggctgggaaggcctgtccgggccttcatgtccgggtcctcgtaacccggagccgcgagtgatccccggggacgggtcgaagcggtgtgtccctgtcgggcttctgtccccggcggcgccgcgcgtcttccgcggtgtcctcgggcccggtggccccgggagatgggtgtcgggatcccgctgacgcccgatccgcgcccgcacaggcagaagtagagcagaagaagaagcggaccttccgcaagttcacctaccgcggcgtggacctcgaccagctgctggacatgtcctagtaagggcggccgcgggggtcgcgggcaggggctgggccagcggtggggcttgtccgggtgagggcggcggggcgggggtccaagcgcctctgcggcggtgggcgggcacggtctccgcgcgggtttggaactgagtgtggtcttgcgcccagaaaactgtccagagacgttgaggtttttgcttatttgcaacctgccccccgttgttcacttttccgcggcttagttggaaggtgtagcccctgtctgtagcccacgtgacttagaataaggggctgcgttagactccttagattttaagggcggtggaggtcgctgggtcctttccaggcagggtggtggtgggcatctggcttgcgcttttattttttaatttttgattattttgaggcggagtctcatcctgtcgcccaggctggagtgcaatggctccgtcccagctcactgcagcctcccactcccgggttcaagcgattctcttgcctcagcctctcgagtagctgggattagagggcccccccaccacgtccggctaatttttgtatttttagtagagacgagtt[137 bp omitted]tgtgtcgtccaggttggtcttgaactcctgggctcaagcgaccctcccgcctcaacctcccgaagtgctgggatcacaggcgggagccactgcgccctacctgccttcccctgcgtttttagaggcctttggcccgagctgtacgctgcagcaccttgtctgaggctgtggtctccgggccgcttgttctctctgaatctctgcagtcacacggtggctcttgcatgtgaggggtgagtcgcgcatatctggcgggggtgccagagggacttggcgtgttcattgtagtcactacaatggacagtgacaggtccactgcggctctgtccctggagagaaccaagccttagttctctgtccgccggagtgcgtagggtctccccaggccgggccgctcacaaaactgcctggtgcatcctccccagcgagcagctgatgcagctgtacagtgcgcgccagcggcggcggctgaaccggggcctgcggcggaagcagcactccctgctgaagcgcctgcgcaaggccaagaaggaggcgccgcccatggagaagccggaagtggtgaagacgcacctgcgggacatgatcatcctacccgagatggtgggcagcatggtgggcgtctacaacggcaagaccttcaaccaggtggagatcaaggtgtgtgcggccgtccctgccggctggggtgggctggggtcgcctgatgcaggcgggatcagctgacacccagctttgctcttggtctcccgcagcccgagatgatcggccactacctgggcgagttctccatcacctacaagcccgtaaagcatggccggcccggcatcggggccacccactcctcccgcttcatccctctcaagtaatggctcagctaataaaggcgcacatgactccagtcctttgcgcagcttgttcttcctggcgtcccgagctctgggaggggcctgggcctgcttcaggttcgtggtgtgaggaggttcaggttggacgttcgggggtgtgtggtagtgttgtgtggatggtctcttggtgtcgaagactgacagctgtgcgggccctgccccaactcggctgcccctgctcctgtctgcagggacagctgtggagctgggtgcccaagcccaggtgtgtagctccgtcccttttggccccctcagcgttcttgacctcggggcagctgcctggcctcactctgtcttctgggtacctcacgtagagggggccactcctgggctaagtgcagcccctcaagccctcacctggcctgggctctcctttctggcttccctcatctcctgtggagggttcccgcaggaagtgaagcagcagcaggaacctttgggccacctgagcccctcccttctatcctcacccctgcttggcttcttagaagctcctgactctcctcctgacaccacgctgctggcatctcctctcccagcaggctccatggctgcagccagccccatccgcccagcctggggctttgtgtccgggacagagccgtgtcccgtggttaggctgcaccatccgtggcctggccagctctgtctcctttgcacagaatgcttgaaagaacaggacaaagtggctgtgcctgtgggtggggggcaccgtccagccctccatgggctctctgatggccgtacgtgggttggagaacatggtgagaactaaccccgttcaatgctggagtcacctcagcccagaaggtggtaactttgctcactaagcacccagcagagtggcccagggatgtggggtgggcctccccttgggcagtggacaggagggtgagagctcagccaggcagatgggggcaggggagatgtgaggagccccaccttcaccctcaaatggcccacaacagcctcctgtgggccctcttctataatgtttctccacttttttttttaaatttgttgcccagccggagtgcagtggtgtgatcatggctcactgcagcctaaatctcatgggctcaggtgatcttcccactgcttcccaaagtgctgggatcacaggcatgagacactgcagctggctatatcttcaaatttaaacatgatttgcagccaggcgcggtggttcacgtctgtgatcctagcactttgggaggccgagatgggtggatcacctgaggtcaggagttcgagaccagcctgaccaacgtggtaaaaccttgtctctactgaaaatacaaaaaaattagcctaactgggcatggtggcatgcggctataatctcagctacttgagaggctgaagcaggagagtcacttgaacccaggaggcggaaatcgcactctagcccgggcaacaagagctagactctgcctcaaaaaaaaaaaaaaaaaaaaaccatgatttgctcgtgttcttacctctcgatttggaattaagttacattacagagaaagtgtgggtccgtgtttttctctctgtttgggaaaaggtgggttggacagaggaaggatggcccagggttataagcttggctccagtacagccgggagacccccaggcagcatgagtcggtgggactggacctgcctggctggtgtccagaggggcccgtagccagtgggacggtgctgcacgtggtcgtgcctcaagccctccactgcaccgggcgccctggccaaccctgccaggaagtaaggagaccggggaggccactgagggcctggacctggctgggtagtcagaagtgggggcaagtcttggctggcagcccctgagatgtgtagaatgtttgaaaattcgcctgtgggttgacctgaacccaccgggcttgaaaccaacggtccaaagtttggagtgtggtcttaaggaaggagaccactactactcctgctgccttcctcccaccaccttgcctagttcacaagacaggaggagagaaaatgcaaaaagttggaaaaaaaatgcaaaagtaagataaacagacaaccttggcaccaccacccggccctaggagttaaaaaaaaagtaataataacatcaaccactgacctaaactacttgtgttatctgtaaattccagacactacgaaaaagcattgtaaaactttctgttgtgttagctgatgcatgcagcccccactcacgttttccacacttgcttgatgtatcacgaccctttcacgtggaccccttaaagttgtaagcctttaaaaaggccaagaatctctttttcggggagcttaagacgcgagtctgctgatgctgccggccgaataaaaacctcttctttaatccagtgtcaggagttttgtctgtggctcatcctgctacagtctggctgctaggtggccgccggaggtctctgggcagcactggccaggttcacttcagcgtgaacagcagaagcttgtacgggacccagcttcgaaggcccaccccaggtccagctcaaggagagggagggaaggcatgtg[134 bp omitted]ttaaagcaattctcctgcctcagcctcccgagtagctgggattacagaagcacgccaccacgcctggttaatttttgtatttttagtcgagacaggatttcaccatgttggccaggctggtctccaattcccaacctcaggtgatccgccttcctcggcctctgaaagtgctgtgctccagcctgggcgacggagactccgcctcaaaaaaaaaaaaaaaaaaaaaagaaattgctgaggtgttaggtgcttttcgcctcagataagcaaagtgggaaattagtggatgtcccactgaaacagctttatctgcaacatggttttcaaccctgagccttagaaatcaaaagtgccggaaaccatggtgcaca[148 bp omitted]cccatctctactaaaaacacacacaaaaaatcagctgggcgtggtggcgggcgcctgtagtcccagctactggagaggctgaggcgggagaatggcgtgaacccgggaggcggagcttgcagtgagccgagatcgcgccactgcactccagcctgggggacagagcgagactccgtctcaaaaaaagaaaaaaataaataaatggaaatgacagagcttttgagctaccaggtctatctgcagagcaaatgacacagagatgtgtggggccgcgcccatcatgaggcagctagctgggaacaagccccagggggccctccctgaggaaagcataataggaatgggtgctgggcctcacttcgcttttgcagagctttactggcacccagctgtgcccattcatacctgtattacttctgccaggcagacgctgaaaatttactgtctggacctttacgggaagtttcctgtccataaaagccctccctgcacacgcccctgctggctagcacgtggctgctaatgggtacttcccttggttttctgcagttggaatccagcatgtgtgatcagggaaaatatgtattagtatttaaagcaaaaagatacccccagttcagagagacacatgtcttggtggccaggtggtgccctaggtccacaagaatttggggggtgtccaggaggtggggtgggagcctctaactagcactagggtgccactgtcgagggccactcccaactcaaggcccaggctctgtctttaggcctctctggccatatccgcacttcttttttttttttttttttttttttctgagacggagtctagctctgccgcccaggctggagtgcactggcagaatctcagctcattgcaacctccgcctcctgggttcaagcgattctgctcagcctcccgactagctgagactacaggcatgcgccaagacgccggttaattttttgtatttttagtatagacggggttttgccatgttggccaggctggtctcgaactcctgacctcaagtgatccacccgcttcggcctcccaaaatgctgggattacaggcgggagccaccgtgcccggccccacgcttctgtttctaccctctggtcccacaccccgctccagaatctgcatggactctcccagacctgcccggccccatctgtgccgtctcagacagacagctccgtcctcatcaggttcaggtctggccccggcgcttgcgggtcagctgccttcaggccctgtcctggttcccggcgcttctcacatccccgcggcctcccccctggacggcagtttacactgaactcggcgccctcccctgacttctgaaggaggagtcctgggtggccccgaagcctccccggcagccgcacggctccgtccccgctccagggttcagctgaggcacctgctggaggcggcctgtccccgccgccctgctaaagcggcgcccctttctccggccgctcgttctttggtttccagggactttgcacaattcataacacccctcttagcccccatcctgcccgggccgcatcttccgcccgatcatccggccctcgacccgcgcagccgcctccgccctcctctcccggcaccgcccacggcctgttctccccgcagccgccagcgggcgcccgcgagcctggagccgggcgcggccctgctctgtccacagcccgcggtggctcccacctcccgctgggcctgcgcgacctgccccccggggcctcccagccctcactgccctcgcgggctgcactctcccccaacactccccagggctgttcggcctccccagcagctccccatgccctgcccgccgcgctggcgtctctcccagcccgctgcagtcccctcgttcacgtcagcttcccaagggcctggattttgttttgttcagtgcagggggacccagcacacagtaggtgctttataaatgcttgttgcatgaatgtccgcgttcggtgtcgcccccttacggcggccccccgcgcgcccagctcggcgcccagcaagccttgtgcgcgcaggtgatgtttgctgaatgactaatgaacctcagcgcgccaagccgggctgattcgggggtggttccgagcttccgcagggtgaccgtccgcgggcagcggaccacagccgcatggcgacgccgcctctggccccccgcgacccccattccccgtgggacctctcgtgcccccacccccacccggcctcctccccgccgcctcgggcccccccagcctcctccgcattcgaactccccagcgtggtcggacccggaccctggcgccgctcggcccacgcgagtcccctcccctctctcccatccttggatctcccaccgcccctccgcagcctcggtcccgcgagactccccagcccccgcgagcacccccagaccccacggtacgccctcgcccctttcgggaggagccccgccccgggcccgcggactgacccctcccgcccctctccgcgcaggcgcagggcggccccgttcgcgtcccgcacccccaccctggccgccgaggggcggggcgcggcgggtccggggcggccgcggctccatggggctcctggggctcctgagcctgctgcactcggccttcttcggggaccaggtagggcgcgtgggtcgagccgttggggagggctccgggccgcgcaggaacggggcggggtccacaccgcgggaacagcgggcgcggcggcggggggcgcatggggcgagcgcgcggaggctgcagagtcgggggtctagtgccgtcgccgtagagaccgttgccgggaaaccgcctcggaaggctggcggggatggaagcccctctcgtgcgccgctgcgacccccagccccgggtctgcgcaagcgcagggctcgcccagcccagccctcggcctctgcaggagaccctcggacccctcctcactgcgccgacgcggaggctgcgccagctggggcggcgggggcggctgcgggggcatcctgcggaggctcggccctgcgcagggtgggggcctgggccacgccctgcgcttctttgggcctcagtttccccttctgggcgcgagcgtatggcctgctttgacgttcgccgccgctgctgttcgtatccgtccgctcccgaccccagcgcttctccagcctccggaatcgtctgaatttcgcggctgtgacatccctcattggaggggaaactgaggctggggggtgcagcggggagcccaaggtcacgcttcgaggccggagcctcgttgcggagctaaggcgcccgcaagagaacgcggggcgggggccggggagctgtccgcggtgctgacggaggcgcacgtctgccgactcgccgccggggaaactgaggcccatagcggcggtcaggcttcagggcgcggcctggaccggcctaccccaccctcccccacctccggtggcctcctcaccggtcagggctctgcccggccacccagccggcggcgggccgtctctatcctcccgcgatgacctggtgccttctctgtccccacccagctcccgatgggggccgcccctgtttctgcctctagcccctggcacagaggaggcatcaagggggcggggacagctcgaggtcagactcagaaggctcaaagacactccaagagtgagccgtgtgccaggctgcggacttgcggggaggtgtcacaggacaggggtgggggagtgagcatttcatggaacttcccctttagcccagcagcagtagggggcgtggaggaccccagggaggagcctaggtcggggtcttgggctaggccctgcgttctgcagtgggagaagggggagacctctctcagtctcctgaagtcctagggggctgtggggggttcttgaggctctgaaatgtctggtgatgtctgagtgtggctgtggttcaaggatttacagggtcgaggattttagtgtgtggggggggattgttcagggacataatgttttgtagatttggggccaagggcatcttgtcttggggtctcagcccccatgtaccctcagccctccaggccctggccacccccagagggataagaagggaggttcagtgtcactccggaggcctggctggcacaggtgaactcaggcaacacgttccctggcccaggcctcagtttccccatgtatacaaggacaggactgaccttggatcccccaaacccctgcctgatgggggcctggggagctgagacatctgaaactacacagggaggtgggacttagttcctctttgggggaggcagggatcatccaacccacccttcagtaaacaagactggaaaccgaggccagagagagacatgcccagggggacacagggacaacaaggctgagctgaagccagggccctgggctctgcatccccaaccccatttcagcctcgcccagctctgccccggcttgacctgtcaaaccccaccacgcgccctaccccatggctccaccagacaccccctgtgtcccaagcatgcattgatcttccctcagcctggaacgcctctcctcctgatcactgctgttcacttctcagggcagccttccagcctccagaaaaaaatccccttcgaggcgggcggatcatgaggtcaggagtttgagaccagcccgaccaacacggtgaaaccccctctctattaaaaatacaaaaattagctggcaaggtggtacatgcctgtaatcccagttactgaggagtctgaggcaggagaatcacttgaacccaggaggcggaggttgcggtgagccgagatggcgccactgcactgcagcctgggggacag[179 bp omitted]tggcgggcgcctgtagtcccagctactcgggaggctgaggcaggagaatggcgtgaacctgggaggcggagcttgcagtgagccgagaacgtgccactgcactccagcctgggctacagagcaagactccgtctcaaaaaaaaaaaaaagaaaaaaaagaaaaagaaaaaagaaaagatcccctgtgtctgcccactgcattgcctccccagacccaaccagtggggacagctgcgtccagctctgggggctcccagacagccaggccgaagggctctcagcccctggcagtgctggcccgggacaaggccctcgggtcttcagctcaaggcccaacaggaaacagcacgggtcctcccttgcctttgtctacggggccttgaatactcggaccttcccaccctctcctatcattccctgcaccagcccttgcagaatcttccgcctcctctccattttacagaggaggaaaccgagggttgagcggcgaatgatttgccctgcctgcccagcacggaaaaaaatcactcttctggccccagtcgcctccctttctgtgctgtgagtctgtgtccagagcaggaagggctgctccgagctgcagggacgggctctgtgtgttaaaccttcaaatggcttccagggactcatggagcatccaggacacctggagatggcgactcctgggacccctggcccttccctcctctggccttcggtccgtgagggtgaattaagtgtgccacccaccaggggcagagacacatggagacagagattgagagacagagaacagagggggagacagaaagagagagggacatgaagagcaacggagttacaggaggatctgacgctccgttggggagacagggagaaatgtggggagatgcagcgtcccaggtgctccccagtggccctgcccctcctcccctctcccctccccaccaggcaggaccctcagggagctccagcctggacccgaaccctgtcccaccctgacgcacctgcaccaggccaggctggacctgtggggtgggtgcaggcctggccccagcccggccactgccctggaaacccctcccccgccaagatgctgatgtaacatccaggatttgatgttttactctccaattctgcaaatccagacgcaggaggttttaagaggccgttgcaccctgcaataaagtgcgggacacaggaatcttggtcctcggggcacccccttccctcgggggggtttcgccccccgcactcacggcccctgagcccgcgcggaggcccgacgccccgcggccgacgccggtccccgccccgggccgccattggctgttgccatggcaccagcccgtcttcccgcgccctcattggctgtctcacccgcatccctcatcccgcatcctcccccgctcgcggtggtctcgcccagcgctaggagcggcagcgccgcctgcccaggcccggaccgggctttgtccgccccggagcccctgcccgcgccgcggagaccccggagcccgcgcgctccgaggccaccccgggccgggatttccggtggggcccgcggagccgcgcagagggaggaggccccagacccaggcgccccgccagcccagctgcacgtaagcgggtgtgtgtcctcggggaggagggcaggggcgcgacctccgcctcgcgtcgaggtttccatccctggctctcagcattgcccgtcagcacagactctggaccctccatttccccagagtgggagctggaggggaaactgagtcccggtgagctgggcgtcagcgtttctgcagccggtcctgcgcacacacccactcacgggcttcaccatccggacctccctgaggtgatcggaggaagggatgggcaggccagtggtgtgtcttcgggggtgttgctgcacctctctgggtgtcagtttccctctctggaaagagggggtttggattaaaggaaggagaaaggcccctttgggcctggcttcccatacctgtgcctccctcccctgaaatgcagcccgctcaataagaccagcccccagtcatggtgccttcagggagtgatcgctcaggaaggcccccaggaggctacacgatgcaacctgggggtgaaagtaggcagaagagcttcgtggaagaagctgcactgtgtgggatggcaggacttagaaaaggtgctctaggcagggcaactgcacgtgcaaaggcctgagagaagagagcctccagcctctaagtgagtcgcggtgtacatggaggagtcggagcgtatcctgagggcactggggagccatggaaggtgtttgagcatgggagaaatgggatctcacttgtgacgtttaaagctccctctggctgtgcatgggggactgtgggaggccaggaagaggctgatcagaatgtcctcacagaggggtgtcaggagctgggggaggcatgatcccgctgggcagagcttggagggactagcttagtctgatgaggatgcagaaatgaccaccgaatgtggggagagggaaggtgtctgaggcttggcttcggtcagctgagaagaaccacgtgggggaggcctgggtttggggagcaggaggcagacatgtgttgctttgcacgtcatctggtccttccacctggctgggcatgggatggtgacctcagctggaacatggggctcgagccagaccccagggtctccctgcgtgtagcccccaaccccaagcctgatccccactggagacctgaacagccttggacatcatcggatcagggtgggaggtgccagcctctgccacctgacttccagtccctgtgcccctcccaccctgcccttgggcactcctgccctgcaggttcctcagaggggcaacccaaagccagagaggggcgggtcttgtcgggcctccagcctggacttcccagcccctctggggcagcatctgggtgccagacctcggttcctagggcctcgtttctccctctgggaacagccaaatggtggtccctgagactcaggacagaccaagaaggagccggatgacatggcaagccacacactgcgtcccctgagcaggacgggacagcccgactccatcctcccacctgcgactgagcccccacccctactcctgtcccagccgtgcccctggtgacatttgggtgggaggggaggggatgagggggcacctgggggtcagagaacaaatgacgggtgaatacatgtgtgtggccaggtggaggagggaggggaggagcaggtgggctggacagggccggtgtgaggaaggggctcaggctggcagggggaggtggcagagggatgggctgccattggtgcgtctgagacaaaggcggagggaggaggcgagcgctgatgggaaaggaacaaagagggaaggggggcgtgaaggggggctccggcgggagggccgagccgagggaggaggcgccggccagctggacagagggaggaggccaggccagagccagaagacggccagaggcacaaagaagccagcgcgctggcagagtcaagggatggggcaggggctgccggggccagcagggaccagctgaaggctgcgcagggggtgcgggccacacaggtagccaccctgagctcagccaccgatggagggtcgtggggctgctgcggtgatggcggtgggcttgggtccatctgtcctgccgtttctgcacagcttaggtgtcacccactggccttcgtggtgttttcattgtccatcggcagggacagctggtggtctgtccgccccgcgtgtctggctgtcagcctctgggcaggcttgcttttatgggggagggtcctgtctgtctgtctgtcgccctctctggctgtgagcctgggggtgctgggctggccagtcggcttgctgggttaggctgtcccagctgtctgtgtgtttgtccggctgtcaggatgtgtcctgggggctgggaaggagaggccgacccatcgtctgtcggtcgactggtcagttggacgttcagctgtctgtacgtctgtctgctggcccctctgtctccccttggggccacctctcactccacctgcccctctgcgccccggattgcctggccaccaccacgtgggcctgtacttgtccacaccagtgactcctgcctgagaccccccccaacccaggatcaggcaggacggctggggcttaggtcaggggccgtctgtccggaaggcatcaccgcgccctccccagaccatcagctgaaccctctgaccctgtgatcccagacgctgcaggagctgaagatggcgagctccgtggcgccctacgagcagctggtgaggcaggtggaggccttgaaggctgagaacagccacctgaggcaggagctaagggacaactccagccacctgtccaagctggagacagagacgtcgggcatgaaggtgggggcctacatggaggaggtgggctagggtcccggggtggtgccccccggcagcccagtgcagtggctgatggcttcccgccctctttcccgcccctgcaggaggtcctgaagcacctacagggaaaactggagcaggaggcccgagtgctggtgtcctcggggcagacggaggtgctggagcagctgaagggtgagcggtggggccacccgcagagggagtgggggaggctggggggaaaggcaggcagggccgctgacctccgccctgtccccgcccatccagccctacagatggacatcaccagcctgtacaacctcaagttccagccgcccaccctgggcccggagcctgccgcccggacccccgagggcagcccagtacacggctccgggccctccaaggacagctttggggagctgagccgggccaccatccggctgctggaggaactggaccgggaacggtgagtgggcgtgggaacccagcctcgggcagctggagcatgactcggtccccagcgggctctgccctctaattcgcccacccgcatatgtctctgcccacacctcacacgccccacccacttgcatatggcactgcccaccgaacaaccccgcccacctcggagcttcgtccccacgtggcctccctccccctccccagcccggctgacctctgctggagttcagagaggatgggggacgttcctggctgagggaaaggctccttggagacgtccccaggggtccgagacacgcaggcgtcgccagggaccgggctgtgtccggtgccagggctcagccaggcctggagccaggcgggctcaaagccgtctttgtagagagctgtggcccaagaagcgtgggctcagggccagcagagggaggcagggtctgggcaccctgtgcagctgggaggggtcatgtggggtcagatggggccattgaagagcagcgtggggttgtctgtgctctgctgtgggacctcactcagctcccctaaaccctcccagcctaagactcctgccctgtaaaatcggaatggccgtgtctcccatgaggttaagggaaacctctgttgcacctggagcactttgagcctgaagctaccttgtaagctggagggaggttagcaagtatgggagaagtgttagaggcaggacagcctccctcagtctttcttcaaggaggagaatttccaaaggaattgctttctcttttttttttttttgtttagtacatatagtttgaaacagggtctcactctgtcacccaggctggagtgcagtggtatgatcatcgctcactgcagcctcgaactcctgggttcaggtgattctcccacctcagcctcccatgtcagggagtagctgagaccacaggtgcgcaccatcatgcctggctaatcttttgtacttttttttttttttttttgagacggagtctcgctctgtcgcccaagctggagtgcagtggcgcgatctcggctcactgcaagctccgcctcccgggttcacaccattctcccacctcagcctcccgagtagctgggactacaggcacccgccaccacg[187 bp omitted]gagggggtctcgctatgttgcccagactgttttctctcctttaatttttttgcatcccccagttaatttcaatacccacccccccccccttaccctagctcggggagtgccacgggagagaccttgccatgttgcctgttaaccttggcatacagtaagcgctaacaagtgattacaaatatcaaaataaacacacacggcgccgccctctgagcccgcccccgctgacttgctccccaggtgtttcctgctgaatgagattgagaaggaggagaaggagaagctctggtactactctcagctgcagggcctgtccaagcgcctggacgagctgccgcacgtggagacggtgagccggccggggagccagggggcagcgcgcccgccccactcagggtgcgggaagcggcgtgggggaggaacggggcctggcccgggcgcccctcaccgtggcccgcccgcctgcctttgccagcagttctcgatgcagatggacctgatccggcagcagcttgagttcgaggcccagcacatccgctcgctgatggaggagcgcttcggcacctcggacgagatggtgcagcgggcacaggtgcggcggtgggcggggtggcgcggcggtaggcggggccctgcgccagtgggcaaatcagagtgcagatattatgggcggggtctggggtaatgggaggagtcttatgcctcctgggttggggggcgcgggttctggttcaggaggcggggccagaagctggaggtgttggtgggtggagtcaggaggctcagagcctgagcacaagggcggtggggtgcgacagtggaaggtggcatggcctgtgggcagggccagatcagcaggtgggtggggcctagaaggacgaggtctaggttctgggtggagcccaaatgggaagtgggaggagtcagagcctgggatggactaaaggcggggtttagacagtgggtggggtcatatcttaggaggcggggcttagggagctggcagggctggatcagggagaaggcagaggtagggtcagggcctggggcggggttatcaggaagaggcggggtcagagcccagggtggggtcatcccagggagaggcggggtcagagccgggggcggggtcagctccagcacttgccctcgtgtggtcctgagcagatccgcgcctcgcgcctggagcagattgacaaggagctgctggaggcgcaggaccgagtgcagcagacggagccccaggtaccgggtggggcagagccagggaccaggggtggtgtcggcccaggcagaacggggctcctcgagttctgcccgcccccgcccacatcatcacgggtgagcagactgggtgctctgggactgtacccccgaccctggtgctctccctgcaggccttgctggcggtgaagtcggtgccggtggacgaggaccccgagacagaggtccccacacaccctgaggatggcacccctcagccgggcaacagcaaggtgagggggagggtgaaacgggggctggcgcagctgtctgggctggaagggggatcaggtctgcatcctcgccagtggtggtgccctcccatgcctccatccagcaccccctcgggtgtaggaaggcccctctggcgtgcagctcatgcagaagctgcgggcctggcgaggtggatggggaaatacgtcccgtagcgggggctaagtggggcaccatagacgtccccgtggagtcccttggctctgcgcggccaccctaggaatgccaggtgaggggggccagcctccccgaagcacgtgtgcagcctcctagcgtcccctcatctgtcccccaggtgggcgtggggctgcccttggggacggggcaggggtcacagggctccgaccgggtttccaggtgtgcggggggcaggtgagggaccccaccctgaccctgccctccccccaggtggaggtggtcttctggctgttgtccatgttggcgacgcgcgaccaggaggatacagcgcgcacgctgctggccatgtccagctcgcccgagagctgcgtggccatgcgccgctcgggctgtctgcctctgctgctgcaaatcctccacggcaccgaggccgcggccgggggtcgcgccggggccccaggggcaccgggcgccaaggacgcacgcatgcgcgccaacgcggcgctgcacaacatcgtcttctcgcagccggaccagggcctggcgcgcaaggagatgcgcgtcctgcacgtgctggagcagatccgggcctactgcgagacctgctgggactggctgcaggcccgagacggcgggcccgagggaggtggcgccggcagcggtgagtgcctggcctggtgggccccctccgcgcaattaacgtgcagctagggcttcccgggggatgggcgactaggacctccagcctttgctgcctgccttctggcgttggaggctgcagtaccaggctccggccgaggcctgtgggggcatttgacgttgggaaaagacccgcccatgatcgtacctggcgcagagtaaacgctcgggaagtcgctgaatgcatggatggatcgtgggtaactctggaaagttgggtgcagactttgagattctttttttgcagttgatcgcaaagttaatatgggggccgggcgctgtgactcacacctgtgatcccagcactttggaaggcagaagcaggagaattgcttgagcccaggaatttggggctgcagtgagctgagatcatgctactgcactccagtctggacaacagagcgagaccctgtctcgtcagttttatttttaaaaagggcagaagcacagctgaaaggtgtggtgctccaggaactacctcgcctcccttcccaaggctgagtgagagaggccaccccatcatcccatcttagagaggctgggaaaggaagtcccaactttgcagccatttgcaaagctcccgggatccttcaggcctggggcgggcgggttgcgggaccttcgggagtcacctgggacatttcctgggaatgggggctctgatctggtccctgtgcccacagccccgatccccatcgagccgcagatctgccaggccacctgtgctgttatgaagctgtcctttgatgaggagtaccgccgtgccatgaacgagctaggtgagtgtcccaggtcctctgggaagccatcctccagcccccgaacaggtggtggctcctcggccgctaaagggacacaggctgggtcatctgagcttgggctggggattggagcccggagagggacagactccctggagtcacatagcacctctcatgagtggaccgtcaccctgggccctctgtccccatgagctgcgtgtggcctcccgatctggtctgaggcttcgggggtgactttcagccctaagttccctggggctcagaacagggaacggaccagaagggcaaagatagatagaagacaggcccagaattggaactgtagggggtgttttacgtttgaggacattgcaacatcttctctttgtcaatataaaaagtaattgaggccgggcgaggctgctcatacctgtaatcccagcagtttgggaggccaaggcaggaggatgactttagctcagaagttcgagaccaggctgggcaaaaatagtgagaccccatcactacaaaaaaaaaattagtcccagctactggggaggctgaggtgggaggatctcttgagcccaggaggttaaaggtgcaaggagctatgatcatgccaccacactccagactgggcaacagagccagaccctgtctcaaaaagaaaagtcttgctgtaacttttttttgagacagagtctcactctgttgcccaggctggagtgcagtggtacaatctcagctcactgcaaact[133 bp omitted]tcggcctcccaaagtgccgggattacaggcgcgagccaccacgcccggccactttacatcttcaaactctgtcccggtgaaacatttcctgctcatcctgtccccagcccctggcacccacccccatcctactttctgtctctgtgaatctgatggagctagggacatcctaggagtggaatcacacaggatttgtcattttatgcctggcgtctcccactgagcgtgacatcctcaaggtgcacctacgccatagtctgtttgtttcagagcctcattccttttgagacagacagggtcttgctctgttgcccatgctggagtgcagtggcgccatctcggctcactgcaacctctgcctcccgggtttaagcgattctcctgcctcagcctcccaaagtgctggagttgcaggcagaaggagccaccacacccggccaaagcctggctcccttctgaggctgcgtgacatcccatcgtgtgcacagggcacgctgggctgacccacttgtcctcctatggatgctctagctgccccccactcctggctctgtgaatcgtgctgtggtgaacctggatgtacgcgtttcaggctggaagttttctgagatatgtccctaactcacttccccaaagggtgtctccactgacccactcctgctctgagaacagtcacatttgcctctgttgtctttgaagagggagaaaagtgttttggtgacaagtcctcctctccctctgactcacaggcgccatctccccgttgatttcccccttttgtaatggggaagcggggcgagtgaagagggtgggtgtggccgtcacccatccctacagccctgtctgtgctggggatgctgctctccatctgatggtcttggggtgtattattagaggactcagggggccttccccgaggcacctatcaaacagggcagggaagaacattccaggctgagggaacaacaggtgcagaggcccagtggctggaggaagcgtgagccaggaccgagggctgacaggaggcgggggtggcagtcacagggcactgggggtacccctgtgggtctggcagcagggtgaggccataccggctcctggaggaggtctcagacttgggcctggaaggggaacttgagggcaggtctggggcatagggagggcctctgggcaagggagtgaggtggggcgctgggcagcaggcagggtcatccctgccacccaccaaccttgttgggtcctcacaggtgggctgcaggccgtggcagagctgctgcaggttgactatgagatgcacaagatgacccgggacccgctgaacctggcgctgcgccgctacgcgggcatgaccctcaccaacctcacctttggggacgttgccaacaaggtgcccgggggcagtgggtgggctggcactttcctcatccagtcttccagggactgagcctccttccaactcatcccagcctcgaaacagccctgagagctggggccacttgtccccaacttacagacgggtagactgaggcccagagagtgcggtgtggggggacgggagcgcgtgctgaacctccccacctggcggtgtcctcacgcccaccctgttgctgcctctgcagaaaatggccctcattgtagagggggcctcagggccccgaggctgggtgtctgcccctgtctgggcctcagtttcccgacctgagcatggggtaaccgtccccggtagtggtcaggatcagcaggggtctgagtttgcagctgcagcacacagacggggctgggaggtgaggggcacagtctcccttgtgtcccaaccccgtgaccccggctgcataacccccaacaggccaccctgtgtgcgcgccgcggctgcatggaggccatcgtggcccagctggcctccgacagtgaggagctccaccaggtacagggcggggtgctgggaaagccttccagggtgtccctgataggcagaggcccctccccagcggtgtggtgggctggcaggggtgtcccgtccgactctctgcagactcacatttgctggggggtttggggggcctggaccctagtcccaccacacttgcccctcaccccacccaggtggtgtccagcatccttcggaacttgtcctggagggccgacatcaacagcaagaaggtgctgagggaggcgggcagcgtgactgccctggtgcagtgtgtcctgcgggccaccaaggtgggcacccggtgggcggcagggatgcttcttcagtcactggaaggagactgctggcggcagcgggcgagctctccgacttgggaggaaatcaagttgaacagctcactgcttagcgggtggtccagcctcagaccggctggggctcactcctcatgtcactgctctttgaaagcaaatgtgggctgggcgccgtggctcacttgaggtcaggagttcgagaccagcctggccaacatggtcagaccccatctctactaaaaaaaacagccaggcgtggcagcgggcgcctgttagtccagctactcgggaggctgaggcaggagaatcacttgaacctaggaggcggaggttgcgccactgcattccagcctgggccacagagca[212 bp omitted]gaggcaggagaatcgcttgaactggggagtcggagcctgcagtgagtcgagatctcgccactgcactccagcctgggggagagagtgagattccgtctcaaaaaaaaaaaacaaaaaacaaaaaaacccaacttcactgaatgtgagcgtgggagcctttcctccgggccactcaggccctgacccgcccctctcccgcccctcgtccaggagtccaccctgaagagcgtgctgagcgccctgtggaatctgtctgcacacagcacagagaacaaggcggccatctgccaggtggatggcgccctgggcttcctggtgagcaccctgacctacaagtgtcagagcaactcgctggccatcatcgagagcggcggcggcatcctccgcaatgtgtccagcctcgtcgccacccgtgaggactacaggtcggcccccacccccccacccgcacacaggcagctgcgctcggggcgggcacagggctgggctgggcactgtcctcccgtgaatgcatgctcccaaggcttccccaggggctgctgtttgcagcataaatacgtcccaaatactgcgtgagatatactaaaatgc[133 bp omitted]gaaagcctgtccctactaaaaatataaaattagccaggtgtggtggcgggcacctgtaatcccagctactcgggaggctgaggcagaagaatcgtttgaacccaggaggcagaggttgcggtgagctgagattgtgccactgcactccagtctgggcaacaagagcgaaacttcatctcaaaa[169 bp omitted]ggcatggtggtgggtgcctgtagtcccagctactcaggaggctgagacaggagaatggcatgaacccgggaggcggagcttgcagtgagctgagattgtgccactgcactccagattgggcgacagagcaagattccgtcttaaaaaaaaaaaaaaattacttcaggctgggctcggtccctcacacctggaatcccagcactttgggaggccgaggtgggcggatcacctgaggttgggagttcaagatcagcctgaccaacatggagaaaccctgtctctactaaaaaatataaaattagccaggtgtgggccgggcgtggtggctcacacctgtaatcccactttgggaggccgagatgggcaggtcacaaagtcaggagatccagaccatcctggctaacatggtgaaccccgtctctactgcaaatacaaaaaaaatagccaggcatggtggcgggcacctgtggtcccagctactcgggagactgaagcaggaaaatggcgtgaacccgggaggcggaggctgcagtgaggtgagatcacaccactgcattccagcctgggcgacagaggggactctgtctcaaaaaaaaaaaaaaaaattaaccaggtgtggtggctcatgcctgtaattccagctactcgggaggctgaggcaggagaattgcttgagtctgggaggcggaggttgcagtgtgccaggataaggccattgcacaccagcctgggcaacaagagcaaaactgtctcaaaaaaaaaaaaaaaagaaaaattagcttggcttggcgtccacatgtagttccagctacttaggaggctgaggtggaagaatcacttgacaataggaggttgaggctgcagtgacctgtgatcacgctactgcactccagcctgggtgatgggagtgagaccctgtctcaattttattttaaatcatattaatataactgtcttcattaaaatatttaaacaatagagaatacttatttataaaaataaataatatttttaattgaagt[144 bp omitted]tgaaactccgtctctaataaaaatacaaaaattagccagtggggtggtggacgcctgtaatcccagcactttggcaggccgaggtaggtggatcacctgaggtcaggagtttgagaccagcctagccaacatggtgaaactccgtctctactaaaaatataaaaattagccaggcggggtggtgggtgcctgtaatcccacctacttgggaggctaaggcaggagactcgcttgaacccaggaggtggaggttgcagtgagcggagatcatgccactgcactccagcctgggtaacaagagtgaaactccatctcagaaaaaaaaaaattattaaaataaaaatgttgttaaataagaaatattaaaataaaaatatttacatgttatttatgaaaacacaaaatattatttttacctggtcatcgtggctcacgcctgtaatcccagccctttgggaggctgaggcggttagattgcttgagcccaggagttggaggctgcagtgagccatgattgcaccactgcactccaggctgtacgacagagcgaaactttctctcagaaaagatagatatagacagaatctatctaagtataccccagataccacataggatatgtgcatgctgttttttcctttttttttttttttttttgagatggattcttggtctcttgccaggctggagtgcagtggcgcgatctcggctcactgcagcctctacctcccgggttcaagcagtgctcgtgcctcggcctcccgggtggctgggattacaggtgctcgccaccacacccagctaatttttgtatttttaagagagagagggtttcaccatgttggccaggatggtctcgatctcctgacctcaggggatccaccccacttggcctaccaaagtactgggattacaggtgtgatccactgcacccggcctaccttttttttttttttaactccatctcaaaaaaataaaaataaaataatttagtctctgtcatgcaatctttgggatatacttataccaaaaattagtctttccaagatccaaacctaaccagatgcgtttacttttacctgccacatctggcccccccatccttcggtgggcaggggagggtggggggtggcccaggctaacccgccctgtgcctacaggcaggtgctccgggatcacaactgtctgcagacgctgctgcagcatctgacttcgcacagcctgaccatcgtgagcaacgcgtgcggcacgctctggaacctgtcggcccgcagcgcccgtgaccaggagctgctgtgggacctgggcgccgtgggcatgctgcgtaatctggtgcactccaagcacaagatgatcgccatgggcagcgccgccgccctgcgcaacctgctggcccatcggcccgccaagcaccaggcggccgccaccgccgtgtccccaggcagctgcgtgcccagcctgtacgtgcgcaagcagcgggcgctggaggccgagctggacgcacggcacctcgcgcaggcgctggagcacctggagaagcagggcccgccggcagccgaggccgccactaagaagccgctgccgcccctgcgacacctggacggcctggcccaagactatgcttccgattcgggctgctttgacgacgacgatgcaccgtcatccctggctgcggccgcggccaccggggagccagccagccctgccgcgctgtccctcttcctgggcagccccttcctgcaggggcaggcgctggctcgcaccccgcccacccgccgaggcggcaaggaggcagagaaggacaccagtggggaggcagccgtggcggccaaggccaaggccaagctggcgcttgcagtggcgcgcatcgaccagctggtggaggacatctccgccctgcacacctcgtccgacgatagcttcagcctcagctctggagacccgggacaggaggcgccacgggagggccgcgcccagtcctgctcgccatgccgcggcccggagggcgggcggcgagaggcaggaagccgggcgcacccgctgctgcggctcaaggcggcccacgccagcctctccaacgacagcctcaacagcggcagtgccagcgacgggtactgcccacgcgaacatatgctgccctgcccgctggccgcactggcttcgcgccgcgaggaccccaggtgtgggcagcctcggcccagccggcttgaccttgacctgcccggctgccaggccgagcccccggcccgcgaggccacctccgccgacgcccgcgtgcgcaccatcaagctgtcgcctacctatcagcacgtgccactgcttgagggtgcctcaagggcgggtgcagagcccctcgcggggcctggaatctctccaggggcccggaagcaggcctggctgccggcagaccacctgagcaaggttcccgagaagctggcggctgccccgctgtctgtggccagcaaggcactgcagaaactggcggcgcaagaggggccactctcgctgtcccgatgcagctccctttcctcgctgtcctcggccggccgcccaggccccagcgagggtggtgacctggatgacagtgactcctccctggaggggctggaggaggccggccccagcgaggctgagctggacagcacgtggcgggcgcccggggccacctcgctgcccgtagccattccggctccccggcgtaaccgaggccggggcctgggggtggaagacgccacgccgtccagctcgtcggagaactacgtgcaggagacaccgcttgtgctgagccgctgcagctctgtgagctcgctgggcagcttcgagagcccgtccatcgccagctccatccccagtgaaccttgcagcgggcagggcagcggcaccatcagccctagcgagctgcccgacagccccggacagaccatgcctcccagccggagcaagacgccaccgctggcgcccgcgccacagggtccccccgaggccacccagttcagcctgcagtgggagagctacgtgaagcgcttcctggacatcgccgactgccgggagcgctgccggctgccatctgagctggacgcaggcagcgtgcgctttaccgtggagaagccagacgagaacttctcgtgcgcctccagcctcagcgcgctggccttgcacgagcactacgtgcagcaggacgtggagctgcggctgctgccctcggcctgccccgagcgcggcgggggcgccgggggcgccggcctccactttgcagggcaccggcggcgggaggaggggccggcgcccacgggttctcgccctcgcggcgccgcggaccaggagctggaactgctgcgggagtgcctgggagccgccgtgcctgcccggctgcgcaaggtggcctccgcgctggtgccaggtcgccgcgcactccccgtgcccgtctacatgttggtgcccgccccggccccggcccaggaggacgactcctgcactgactccgcggagggcacgccggtcaacttctctagcgccgcctcgctcagcgacgagacgctgcagggaccccccagggaccagcccgggggaccagcgggcaggcaaagacccaccggccgccccacctctgccagacaggccatggggcaccggcacaaggcgggaggcgccggccgcagcgcggagcagtctcggggcgcgggcaagaacagagcagggctggagctgcccctgggccggcccccgagcgcccccgcagacaaggacggctcaaagcccggccggacccgcggggacggggcgctccagtcgctgtgcctcacgacgcccactgaggaggccgtgtactgcttctacggcaacgactcggacgaggagcccccggcggccgcgcccacgccaacccaccggcgcacatcggccatccctcgcgcttttacgcgggagcgtccgcagggccggaaggaggcccctgccccgtccaaggctgcaccagctgccccgccgcccgcccggacccagcccagcctcattgctgacgagaccccgccctgctactccctgagctcctccgccagctccctcagcgagcccgagccctcggagccgccggccgtccatccacgaggccgggagcccgcggtcaccaaggacccgggcccaggaggcggacgcgacagctcgcccagcccgcgggccgcggaggagcttctgcagcggtgcatcagctcggccctgcccaggcgccggccccccgtgtctggcctgcggcgccgcaagccccgagccacccggctggatgagcggcccgcagaggggtcccgggaacgcggcgaggaggcagcgggctcggaccgggcctccgacctggatagcgtggagtggcgcgccatccaggagggcgccaattcaattgtcacgtggctgcaccaggcagcagctgccacgcgggaggcctcgtccgagtccgactccatcctgtccttcgtatccgggctgtcagtgggatccaccctacagccccccaagcacaggaagggacgacaggcggagggagaaatgggcagtgcccggcggccagagaaaaggggcgcagcctcagtcaagaccagcgggagcccccgttcccctgcaggccccgagaagccacgtggcacacagaagaccacgcccggggtgccagctgtgctccggggacgaacagtgatctacgtccccagcccggcaccccgtgcccagcccaaagggacccccggcccccgcgccacaccgcggaaggtggcgcccccttgcctggcacagcccgcggctccagccaaagtcccgagccccgggcagcagcggtcgcggagcctacaccggcctgccaagacctcggagctggcgacgctgagccagccccccagaagcgccacaccgcccgcccgcctcgccaagaccccctcctccagctcctcccagacctcgcccgcctcccagcccctgcccagaaagcgccccccggtcacccaggctgctggggccctgcccggccccggagcctccccggtgcccaaaacgccggcgcgcacccttctggcgaagcagcacaagacgcagagatcgcccgtgcggatcccgttcatgcagaggccggcccggcgtgggccgccaccgctggctcgggcagtcccggagccgggccccaggggccgggcggggaccgaggcgggcccgggggcgcgcgggggccgcctgggcctggtgcgtgtggcctcagccctctccagcggcagcgagtcctccgaccgctcgggcttccggcgacagctaaccttcatcaaggagtcgccgggcttgcggcgccgccgctccgagctgtcctcggccgagtccgcggcctctgccccccagggcgcctcgccccgccgcggccggcccgcgctgcccgccgtcttcctctgctcctcgcgctgcgaagagctccgagcggcaccccggcagggcccggccccggcccggcagcggccccccgcggcccgacccagccctggcgagcgccctgcccggcgcaccacctccgagagcccgtcccgcctgcctgtgcgcgcgcccgccgcccggccggagactgtcaagcgctacgcgtcgctgccgcacatcagcgtggcccgcaggcccgacggcgccgtccccgcggcccctgcctcagccgacgccgcgcgccgcagcagcgacggggagccccggccgctccccagggtggccgcgccgggcacgacctggcggcgcatccgagatgaggacgtgccccacatcctgcgcagcacgcttcccgccacggccctgccactgcggggctccacgcccgaggacgccccggccgggcccccgccgcgcaagaccagcgacgccgtggtccagaccgaggaggtcgccgcccccaagaccaactccagcacgtccccgagcctggagaccagggagccccccggggcccccgccggcggccagctctccctcctcggcagcgacgtggacggtcccagcctcgccaaggctcccatctccgcacccttcgtgcacgagggcctgggggtcgccgtggggggcttccccgccagccggcacggctcccccagccgctcggcccgagtaccccccttcaactatgtgcccagccccatggtggtcgcagccaccaccgactcggccgcggagaaagccccggccactgcctccgccaccctcctggaatagtggcctaggccggccttctggaacgttctctcccggccctgcggcgcggtctggctgccccatgggcctgcgctgtagacgtcccccataggtcgccccagggcctctgcccacccgagccccaccactctcagaacccccgcccagcgcacggcgacctcgcgcctcaccggaagaccttgcctctgtgccgcggaggtccaggaggaaacggggcggccgctaggcctcaagtcccgaccgtggagcgctggcaagggcgtcctggcccagccctgagcgcgcggcccttcccctgtcggaagccgttgcttgaccccgggcgagggaggcggtagcctccgggtccgggtctgggtctgggtccgctgcttcgcagggacagcgctggggaggtgacggcgcccgccgcaggtggggcgaggctgggggagggcggcgccgcggcgggcctgccagctgggggcctttgcggcgcgcaggggcgaagcctgtaatcactgcagccgccggtaattcgctaatgagggctttgcagggattgttttcattctcagccccagctgtgggagtgcgggtgggggtgtggccgagccccggcaggaagccccgcccagacggtgttcagggaacccggagcccaagcgctccggcggagcccaaaagggtgggggtgggaggggcagaggccaacggatccccctgcctgtcgcaccccttggcgggagacgggaaggcagcgggctgcgtacgatgggaccctggtgcagacgccgggccggctgacatttggaccccatcccagaggagatgctggctaccagctggggcgaccccaagggtcgctggagtcagtatcggcccggcgcagccgcggcgggcgaggccaatggaaaggagactgaggggagtcccggcagtgagcccgaggccctgggacctggagcccgcgctggcctctccccagcggagcctgcacgttacggagaccatcacatgtgggcgtggtcagtgcccaggaccgcaccgctgctcatcttgtcccttttcaattcccttctggttcatgatgcataaagcgctaggccctagaactccagaaacagcacagctggggcggggacccagccttgccctccacccgaggctctgggacaaggcgggaggttcgggggccttccggcaggtgaacgcagggctggagagtatttggtgccagatgaggtgaaagcttatagaagggcctgaggggctcggctgcctcatcccctggcgggggaggctgggagctgggcctcctgcgtggggtgggactcgcaggggccgggtctccgtgactggggcaacgcctcgtcctgcagagggagccgacgacctcttttctgcagaaaagctccagcaggcgctgccttcacccacggatctgcccaggctgaaggcacacgctcaatgccccacgtgccttctccaggaggaacgaagcagggtttgagggttgggtggatggagctcagaaggaaaccccagccccaccacggatgacaccatccctcccgtcccatccccagcatgggcaaggccagcctttctggcagaaggagctgtcctcaactcagggccgctgtgagcaaagctgaccccagcccccacccccagttaacactgctgcttctctgaatgcatgtcacgctgcaccccatgctccgggcccacaccctgcaggacaaggagctccagacaggacgtccataagtcaccgaggtgtgccacccagcaggtgctggaggtgcccaatgctccctcctaggacctcgcagccaggcaaggctgtcaggttgttttgggggaagagggggtcatggatggctgagcagagagcggggaaaatgcaggctgagtggggcgacctcctgcctgccaggagccccctttcaggacacagcgggggtctcacacttgctgtccccatccatggcccgagggggaacctggtggtctcttctgagcttttggacttggggatgccaaacacgtgctcaccctcacactcgccccggcccgctgcgcccctaattgccaaagggtagggaaatggcgaagccagccaccaggtcgctggtgacagggccagggttatgcaggaaggtggtgcggcattgccttccacatatgtaagtctctgggcggcgccctcccagctccctgcctctgtttccccatgtgggccgtggggaactcccagagctacctcttgggggagcgtggtggcagcgatgatggggagacgcctggaagctcacagaacttgggtctggctggctcctgcccgtgacgccttgcccagcagcaaggtgcgcaacatggctgccagccccgcctcccacccccaccccgagtcctgagctcactttcgccttctccatcccctgccgtgggggccacagccacacctcaccgcccagtccagctgtctccagaaggggacaggcagtccgcggtctctggacaatcaactcaaggtacgcccactgcaaggcctccctcccaccgcggcccctgcctggccacctggcctctctgcaccagggtgacaaggggtcctcgtctgccccccaatgctccagggccagtcctaaggagctgagggtctgaggacgcagggagggtggaggtgtcctgaggctgatggacagtgaccgccactggcccccaacatgaccacacgtgggtgctgaactcggggcgccgtgcccaccggcatggtcctcccgagctccgacagcattacctcacccggccccatctgttgccccggtccagccctgatggcgcgcgcctggtctgtctgattcccctagccgccaccccacgtttctgtaccgggtctctgcagtgttaaacggacgtgtaaatagtggtaaatagtgaaagcctgtccttccctaaatgtaaagccatctgtccggcgtaaggacgacaccgtcagctgtccgactcgcacacatttaataaactgagctcttgcattgcctgccgccatcacctcttcctcaaaatgggctgtgggcgggtaggttcatcgctgtctatgtgctgccacagaattgctgagaccccccaggttagatccctggaagcagagccagaaagcagaaactgggggcacagggtttgtgggcaccccacccagatgggccggggaggcactggctgaggccaggagtctccccctggtcccaagggagggcaggctccagggggtgcacagcaccccagacagggggtccaacctgggcattggtacctgggccagttattatggcaggccccagtgtggggcaggaggcacccatgagccactaggagctgtggctggtgcaacagctgggatggggcagccacagcagccactaccggggagagtcaatggtggacaggggctgcgggagctgggacggccccacgtcaaagccacttcagggagcacagccctggcccagctggggggacaaggaaagctatgactgcaagcagcacagaagtgcagggtgggaagggatggcaggagccggccccctccccaccttccaccctgggacactgccgggacctccctcggccaggtgagcagcttcagaagcatgaccagtgagaagtccctagggcccaggccgggctagccaagtcccagtttctggatgaggcgcctcccaggctgtgtgtggcaggccccctttcttcagggaataagaaacatcttccacattcaagaaacaaagctggctgtgggtctggagagagggtgaggcagccccaggtctctgggtcaggcggacggtccctgcatgcagtgcccggcaggactgagcagggttcccggggtcgccggtacccatccctccccagcttccggggccccgggacggagccgctcacagaggcaccattcagacggccagacacacacgaaagctttatgtgcagggcccagcctctgggccgccttgcccaggtttccactcaagttgctatttaggatgaaaagcctttggcaagaccctccgccgcactaacgccccctcccccagggccagaacccgcagggaagcaggcccaggacctgctgcagctggcagggtggctatgagactcaggacaccctgggctcctggccagtgactcacagcggtcctccagcaagggcagtggctgggagacacccgtgccgtggagctaggcccagcctggctgggtctcagggctgcttctcttgggtgaccccagcggcccagggtcgttgtgaagatcaacgtggcttgtgggaggagcccggggcccagaaggaagtggggtcaggggctcaggctggccctcgggctgctctgacattgggtgggcactcgctggatggaatcacagttaacacctcgatcccaacacctggactcagaagtggacaggcgagtgcctgccccgggagaggaaggaggtggcacctgctcccaggggccccactgcagagcacggccactgtgagctgacgacagaatcacagtacagcaataatgtccctatcctcttccagaaccccagtggggccctcaggtcacgcaggacggagccagctgggtgggtcccaccaactcggcatgaatgagacgacggatgaaccgcagccccagcatcaggaggggcgcctgtgtcaacacccacgtgggctgggaccccgtgaatgccagtctggggccgacggacccccagggaaagcctgggtgcaggccaccttgtgcgctgcccaagcctgcaggccccgagaggtcagcctgaggaggcagcctcggctgccggtaatgctgcctgcttcatctgggccacctcccgctccaggtcctcgccggctcgctgcaggagctcacacctctgcctcagcacgttgcccgcctgctgcagccgctggttggcagccacgtaggcccggctttgctggtagagctgctctcccggggcctccgcatcctccatcatcctgaagggaactggggggtctgagacaggacacagcagcatcactgcctgctgaccaccccatcctcctgggcacccctcactactgcccccaaagggcagggttccctgcagtccccgagtgagcttgccagccggggtcttcttaacatgacggatgcagccaggtgtggtggctcacgcctgtaatccagcactttgggaggccgaggcgggaggaacacttgagcccaagagttagagaccagcctggacaacatagtgacacccccatctctaccaaaaaatacaaatacaaaaattagctgggcgtggtagcacgcatctgtggtccctacttctctggaggcagaggcaggaggatcgcttgagactgggaggccgaggctgcaataagctatgatcgtgccacggtactccagcctgggtgacagaatgagaccctgtctcaaaaataaataaaaacaaaaatcaagtaatggaggcttcctcgtccatcagctgggagaggcacagtggctgggtggcaggaggggcttccagctctaggctacccgccttagcaaagcgtgtgaccagggggatcgggtcacagaaagagctcaagcctcgccagcagtggccctcctgggggcggggcttccattcctgcaaaagccgtggcacccaccgggatggactccactgagctggcctggctctcattcctgctgtctctggaagccagagacgcaacaagcccgccaccgaaaacctctccaggggccgtgcaacctcctggagcacacacttagggaggcaggggtggcgaaggtgagaggtgggcattgacgtcctggtgactcccacattcagcagaaactacgtatggctccctgctcccccacgtatgcaagcccagtgcagcagggctgaagcagcaccgacttcagggtcactcagagaagcgtcaggggcccctcggctctggcctgcccctcggcagtgtggtctcccacggacgaaggctccacgtgccgcacgggtctgggctgatcaaatcacctctgtcatcacctgctttagcaacagggtgggaaaggccgggcagtgcctggatgaaggcacaggaggccccctaccttctgtgagcgccccccgtcccccgcacagcgtgcctcagtttcgccacactcaacggccatggacctgagcccatgaagctcaaaccacggccccagcaccctcaggtgaccgaactgcatgctgggaataaaaccaactcatgcaccttgaccagtaccggcccacagaaccttccagatgatgcgcacacctcccaccgatgctggtccacaccagccaccagccatgtgtggctcctgggcacttgaaatatgtctaaagggaaaacacaactcaatttttctctttttttctttttcagagacagggtctcactctgtcactcaggctggagactccaactcctgggcgcaagcaaccctcctgcctcagcctcctgagtagctaagaccacaggtgcatgccaccacacccagctagtttgtgtatttttggtagatataggttttgctatgctgccaaggctggtcttgaactcctggcctcaagtcatcctcctgcctcagcctcccaaagtcctgggattacaggcatgagccactgcacctggccccagaattttctaatattactttttaaaaatgttcccttagaaattcacagtttctatcattccacatggctcattttcttttttcttttttttttttgtttgagatagagtcttgctctgtcacccaggctggagtacagtggcacgatctcagctcactgcaacctccgcctcctgggttcaagcaattctcctgcctcagcctcccaagtagcagggattacaggcatgcgccaccatgcccagctaatgtttttgtattctcagtagagacggggtttcaccatgttggccagggtggccttgaactcctgacctcaaatgatccgcccacctcagccacccaaagtgctgggattacaggtgtgagccaccgcacctggccgattcatcttcatttgtttcccgccagccccagaacagcctggggcagacattcttgtttcttttgttcacttgtccattagcagtgctctaagcgcagagcccagcacacaggaagtgctcaagaaaaggattgttgaatgaatgaatgagcctcatccagaacacaaaattcacccaactgcactgctgaatcctttggtctctgactagcttccacctcgtaaatcaggagtggacaagctttcctgccaaaggctggagtctctgctcccactactcaactctgcccttctggtgtgagagcagccactaaccgtatgtgaatcatttggctgtgtgccgtaaacctttacttaccaacactgaaatctgaatttcatacctctttcaggtgtcagaaatgttctttttcacccacccccatttaaaaatgtgaagtccattcatagctcccagaccttaaaaaaacagccaggggcagggtttggggggccctagcttaccacctctgttttactttatttatttctatttattaattattattataattattgaaacagagtctcactgtggtccaggctggagtgcagttgcgtgatctcagctcactgcaacctccgactcccaggttcaagtgattctcctgcctcagtctcctgagtggctgggattacaggcccatgccaccacacccggctaatttttgtatttttagtagagacaaggttccaccatgttggccaggctggtgtccaacctctgacctcaagtgatccacccacctcggcctcccaaagtgctgggattataggcgtgagccaccgcaccggccacttatttatttttgagacacagtctggctgtgttgcctaggctgtatcctcccactttagcctccaagaagctggggctacaagtgtccaccaccacacccagtaatttttttttttttttgagacagtctcgcactgtcacctgggctggagtgcagtggtgcgatctcggctcactgcaaactctgcatcccgggttcaagcgattctcctgcctcagcctcccgagtagctgagattacaggcgcctgccactatgcccagctaactctgttttgtttttgtttttgtttttgttttgttttttcatttttagcagagacggggtttcaccatgttggccaggctggtctcgaactcctgggctcaagcgatcctcccgcctcatcctccgaaagtgctgggcttacaggcctgaaccacagcgcccggcctccacccctgtcagaagaaccctctgaaaatcggtcccactctacggaggagtagagggagactcggagaggatacggaccgtgcccatgttgcgggggttcccagggcgtggggtcaggagttaggggtgtgcttctctcccgtccccttgctgccggggtctcaggtccgcttttccccgggaccgggctccccctaccttccggggccaggatggtgaacactggatcctctgccggcgcaccccgcacatcctccaggatctgctccaccgtggggggcgctgggcgggtgggcagcagcacgcgcttctttgccttggagcccatctctgaaggcggggaagggggcgctgaccggggcgtccacctctccgcccttgcccgggctgctcctcccgcccagcgaactcgtacgcacccgtcgcggtcccgctcccggggaagcccgccctgtcccgcccctctgagctcgccccaggccctgaccctccctccgcccaaaaacacggtggccaaggcttcagggtctggctcaacctctgcctcagtttccccgcggtcaccccagtcgccggcctcttcccacctgggcgcgggacccgaaagcccagcgtcgacgacgcagccacttccgattccggtcggagcaccgccccgtccccgaacacgtgacacacacttccggcctcctctcccgccggcccgccgctcatcgcggggctccgccccgtcttaaagggatagtgcccttgagactcggatctcagcctctcaggcgaacccgaacctggacgcgctacgatgagagcgagttcgagtccaggctccactggctgggtagaaaagcatccgaggctcgtctttctgaaaaggggaacacggcactaggggacacgccacccatgtggctgacgggagcacaaaattgctgtccacctaagggagcctggtggtgcatgagcactcggcggccggaacacagcgggggcggggcggtcgcggcgcctccacttccggccaaggcgggtcctcccacctcggggacggtgctggaggtcaccttttcctctccgctgatgcctgggaaggcagaaagagcagagggcccttttcctctctcaggggctttattgagatgcagtttacataccataaagttctcctgtttatttcgttttgttttgtttttttagagacagagtctcactgtgtcgcccaggccggagtgcagtggcgtgatctcagctcactgcaacctccgcctcccgagttcaagcaattctcctgcctcagcctcccgagtagctgggactacaggcgcccgccaccacgtccgtcaaaatttttttttgtattttagtagagatggggcttcactgtgttgcccaggctggtgtcaaactcctgagctcaggcaatccgcccgcctcagcctcccaaagtgctgggattacgggcgtgagccaccgcgcccgg[136 bp omitted]ccgtctctactaaaaatacaaaaattaggctgggtgtgttggctcacgcctgtaatcccagcgctttgggaggccgaggtgggtggatcacgaggtcaggagatcaagaccatcctggctaacatggtgaaaccctgtctctactaaaaatacaaaaagaaaaacaaaattaaccaggcatggtggcggttgcctgtagtcccagctactcaggaggctggggcaggagaatggcatgaacccgagaggcagagcttgcagtgagccgagatcgtgccactgcactccagcctgggcgacagagcaagactctgtctcaaaaaaaaaaatattgttgagagagaaggaaggaaggaagggacagagagagggaaaaggaaagaaagagaaagaaaggaaagaaggaaggagaagaaaaaggaaggaaggagagagagaaagaaaaaaaagaaaaaggaaataaagagaagaaagtaaagaagaaaagggagaaaagaaaggaaaggaaggaaagagaaggaagaacggaagaaaggaaggcgagagagaaagaaaaagaaaagaaagaggaagaaagaaaaaggaaagagaaagaagga[172 bp omitted]aaaggaaggaaagaaggaag[137 bp omitted]atcgcaccactgtactctagcctagtcaacgtagggagaccctgtctcaaaacaaacaagaaaaaaaacaaaggaatcaccgcaggagaggattctgggccatggtgagccatgttctggggctggacattactgctgacccccggccattccctgctgttcccactgcctggggtccctgggcctgggcggactctttctccgtggccggctgcattctccatggactgatgtccggggaccccaagcagaaaccacctgagccctggggcctcgggcccaccctgctccagaggaggccacagactgagcaccttctaagcaacctttatttgcaaactctgaggttggacgcggtgcccgaggcggacagtgtcacgtttctctccctccactttcccctggcttttggggtgctccagcctctccccccagcccactcccgcccaaacccaaaatgcagaggagacttctctctctctctctcccgccaggcttcggggttccacggggcccatccctggcaggccaggcgtcgggtgctggtgctcgctcctctggggccagcctggggaggcagcatggcagcagtgcctgtcagggacccaggcgggggcaaggtcgctttctgagctgacaacttcaggttccagctggcagccagacctggggtttggtgggggtggccctggcacgggagagccaggcgtatagtgggaggtccatggacatgccgcagaggacggggcctccgagggtcacggccaggaggctcagcaccatggccgaggctgggcagcggtggtggggacaggcggcagctctaagccgggggcggctgtcgggggtggtgggtcccatgcaggagccctgctgctggtccagcgtggaggatgggggacaggaggtgcagtccctcggggagccgccgcggcaggtgtagcaggaggcatggcagctggagcagaccctcagcgcgggcgccgccgtgtgcccaggcccagcggtcaccagccttgtgtggttgaagaaccgcggggggcagtaggccaggcagagctgtcccaggatgtaggcggggccgtcacacgctgctcggggacacgcacgcaaaggcccgtcagcttgccacccgcagcctgttactcgccacccgcccgcctggggccacatgcacgctgcccacggtggccgccaccgcctcccagcagtgggccctgccccgccggcactcaccctggcacagcccctctgtgtcccgctgcacacacgcgctgctggtcacctgggggcctgtaggccgcgctgtcatgtcctcggccgtcccatagagcagcagcgtgtagcggtacaacgtccctggacaggggtcgcgggtgggcacaggaggaaaaggaggctctcggcagcctggtcctggtagtccccgggctccctccccttcagctcccacgcggggccctggactggttcacatctctcagggaattgcacacctactgtgcgcctgtcactggacaccgacatctcccgggtgactgcacacctactgtgcgcctgtcactgggcacctacatctcccgtgttaccgcacacctactgtgtgcctgtcattgcacaccatctcccgggtgactgcacgcctactgtgtgcatgttctcttggagaaggccactgggaaccccttttgcagtgcggtcaccaaggctagctccagagcccctggggggaggttggagagccaagccccgcccaccacagccccgccccgccctcacccgtgttgaaatagtagcccttgttctctaggcccagggtccacacgccctgtgggttctcatcccagaagtgggtggacatgaagacccagttgttgtagccttcagtgctgacgtccaagggtctgggacagaagggtgggtgggggtgggggtgtcaagagggatggctttgtgaagccggcagagccccatgaagtgtctgaccgcacgcgctggtggccgcgtgtcctctgggtgtgggtgagggtgtgactcggggtcccaccaactaggctgccgtgtgactcctatgggcctggcccctccccgtgaggacactccgggtagatggcagcgtttaccgacagggcatgaggccgccccctctcctctgcgggccgctcaccgtatggccacgagtgtggagcgcgtgcccatggggctggtgagcgagatctccaggtctccgcgccggctgtaggacagcgtcagctgcgcctgcacgtgctccagcgagcggatggagttgtggaggccggcgcaggccgatacgttttccctgatgtagatcagcggcaggatggggctgagggggtcgaggggtgaggaccctcctgcggcctgctggggggtgggtgggcggccagcaggcgaggtcggggctcagaggtcacggggtccagccctcgttttacagatgggtaaactgaggcctcaggcctgtcccccacacccccagcggggatagcggaggggcgcgcaggggtctcacgtggggcggctctggacccggacggcgcacttcctctgcggctgggtgggcagccaggtgcgggcggtgtccaccagcagcccggcgtccagcagcccgtatccgtagtgatggctcactgcgcggaagggcagcagtcactcgccccgtgggccccgggtccccgcccccgcccggccccgccgcaccttggcgccccacgccgttggtcctccagtcctcggcctgcaggtgcgccggcttggacgcgcggaccaccaggtgctgcatgtctctccacgtcaggaacgggctgcggggggcgggggcgggggcgggtgagccgccgggccgcgcctgggggcgagggcggtggaccgggccccgcagtcacctacttggcctccagcgctagggcgatcatgccggccgccagtggggctgaggccgaggtgcccgtgtgctggtctgtgcacccgtgatgcaggtccgtggtgacctgagggcagaggggggtgggactcggggggccgtgcacagtgagaatacagcccttcttcaaaaagtaccaaggactgggcgggcgcagtggctcaggcctgtcatcccagcactttgggaggctgaggcgggcgtgttgtctgaggtcaggagttcaagaccagcctggtcaacatagtgaaaccccaactctacaaaaatacaaaaattagccaggcatggtggcgggcacctgtagttccagctactcgggaggctgacacaggagaatcacttgaacccgacaggcagaggttgcagtgagcggagatcacacccacgccactgcactccagcctgggcaacagagccagactctggattaaaaaaaaaaaagt[131 bp omitted]tgtctctactaaaaatacaaaaaaattacccgggtatggtggcggggcacctgtaatcccagctacttgggaggctgaggcaagacaatcacttgaacctaggaggcagaggttgcagtgagccaagatcacaccgttgcactccagcctgggcaacatggcaagactccatctcaaaaaaataaaaaaatagtaccaagaactgaagtcaaaaagtaccaaggactggccacacagtggctcacgcctgtagtcccaacactttgggaggctgaggcgggcagattgtttgagctcaggagtttgagaccagcttgtggcaacatggtgaaaccccgtctctacaggaaaaatacaagaattagctgggtgtggtagtgtgcacctgtaatcccagctactcaggaggctgaggcaggaggatcgcttgagcctgggaggtagaggttgcagtgagctaagattgcaccactgcactccaacctgggtgacagagtgagactctgtctcaaaaaaatttaaaaaaaaaggtaccaaggactccaaggactgagttcaagaagtaacaaggactatgctcaaaaagaactaagagcctggccaacatggtgaaaccccgtctctactgaaaatacaaaaaaattagccgggcatggtggcgtggcctgctattcccggcactttgggaggccgaggctggtggatcgcttgacctgaggagttggagaccagcctggccaacatggtgaaatgccatctctacaaaatatacaaaagaaattagcaggacatggtggcatgcttgtggtctcagctgctcaagaggctgaggcacaagaatcgcttgagcccggcaggcgtaggttgcagtgagctgagatcatgccacttcactctgttgcacccagcctgggtgacagagc[131 bp omitted]aaaccctgtctctactgaaaatacaaaaaattagccgggcatggtggcgggcacctgtagtcccagctactcaggaggctgaggaaggagaatggtgtgaacccgggaggcggagcttgcagtgagctgagatcgcgccactgcactccagcctggacgacagagccagactccatcttcaaaaacaaacaaatgaaaagaaaccctgggctgaagtgattctcccactttggcctcccaaagtgagctgttgcgcccggctggatttgtttttgttttgttttgttttgttttgttttgagacagggtctcgctctgtggcctaaactggagtgcagtggtgcaatcttggctcactgcaacctccatctctggggttcaagcgattctcctgcctcagcctcctgagtagctgggattacaggcgcccgccaccatgcctggctaatttttttttgtatttttagtagagatggggttttgccatgttggctaggctggtcctgaactcttgacctcaggtgatccacccaccttggtctcccaaagtgctgggattacaggcgcgagccactgtgcttggcctggatttgggttattgattgattgattgattgatttttgagacggagtctcactctgtcgcccaggctggagtgcagtggcccgatctcggctcactgcaaaccctgcctcccgggttcatgccattctcctgcctc[214 bp omitted]ttcaccatgttagccaggatggtcttgatctcctgaccttgtgatctgcctgccttagcctcccaaagtgctgggattacaggtgtgagccaccgtgctcggcctggatttgcattttcaaagcagctttgggagggtgctaagtcacagtggtggggacaggaggaggccaggctgggatggcagggcctggggaggggaccctgttggggcggctgcactcacgatctgggggtcggtggccacgccgctgctgtaggtggtggtgagggtggaggcgcaggcttcgctgtaccagggcacgcggccctgctgggtggtgctgcccacggaaagcgtgtggatgctgttggtgtagccgtcgcagttgcagttgtcgtagtgcaggccgccgttgcccgaggcccagatgaagagcgtgcccagcccgccgcggccctgggaaaccaggaggggcggggagggggcgtcggcctggcctgccacccctgccctcctcgggctgccactcaccttggtcacaccacgccggaaggcctcgcgggtgaggatgccggggccgtccaccgtgcggccgtcgtcctcgggaccccagctggcgctgtaaatgtggatgtgctgcggctgcaggctcagcgactgggcctcgatgacatcggtgatggtaccgtccagcatccgtacgcctgcagagccagggcgggagggccgctgccaccggccctgcccttccccacaccccagcccgccccgcgccactccacaccactccccagccctacctgggccctctctctgctccctggagtgggaccattcgtattggctcagcaccccccaagccctggagtctggggccctagcaccacccagcagtgagagggtgggctcccgagtccttgggcccagctccccgccagagtcacccccttccctctctgtcccggaatggtgccgctgggggaccccgggtacctccgattcgggcgttgaaagcgacccccacaccacagaagccattgttggccatcgcggccacctccccagcacagcgggtcccgtgcctggtgccagggccaagaggggctcctgtcacggcctccatccccctgccgggtactggggcttcccccgtgtgctgtgggagccctgctcaccggttctctttgctgggggtgtagcggggctgggggtccgggtcgtagtcattgaagtcatagctggccagggggtcctgggggcaggtggggatatgagggggccgggaggcgtccctagggtggtgccagcctcggcacctggggcagccctcgcccacagccacccgcggtctcacgtagttggcccagaggtccgggtggtccttctcgatgccatcgtccagcacagagaccacgatgccctggcctgacagcccctgactccaggcctgcaggatgctcaggtctggttgggcctcgctgttctgcagggggaggcggggttgtgaccctgtgagggcctggagttgagggcgccagcggccccgtccccgtctacccaccctggctgcctgctcaccatgtaccactgcttggagaaccaggggtccgtgggcaccacgacagagcgtttcacccgccgctgcagcgtctgctgctggaaccactgcacctgcagagcagagggtgcatcaggcctgtcccctgctcgcccctggggcccctcgtggttcagggagtgaggcagccccgtgccctgggaccctgtgtttgtgggggttgctctccagggtccccatgtgcctggggctctgtctgcagtcggaaggggtcgaggcttttggaccacctgtccttgggcccacagacgcgtcgttgctgccgcgggtgactgcaggtccccgggtccccaccccactctctcccccatccctgttctagatccttctatctctctcctgcatcacttccttattttttttctttttttgagacagagtcttgttctgtcgcccaggctggggtgcagtggcgcaatcttggctcactgcaacctctgcctcctgggttcaagcgattctcctacctcagcctcccaagtagctgggactacaggcgcacaccaccatgcccggctaatttttgtacatttagtagagatggggtttcgccatgttgatcaggctggtctcgaactcctgagcttaagtgatctgcctgccttggcctcccgaagtgccgggattacaggcatgaaccaccacgccaggcctggcttctctcttgcaaaccacatcaggaactggccactgctctccctcccggtgctgtaagcaggcagctgtccagtcctgttcaaggcacttcctggcctccgagggcttcccaggctccatcccaacccctcagcttgacatcccaggcattttctagacagggcccagcccgatgggacccaggcccctttctgagcgcctggacactgcgtcctgagggc[132 bp omitted]tctcctgcctaagcctcctgaatagctgggactacaggcgcctgccaccatgcccggctaatttttttgtattttcagtagagacagggtttcaccgtg[139 bp omitted]cccttccctccatcccatgacctagacggtggggaagtcacgccgtctgtccctccttaccagagcccctggggcccagaggagggagggggaggacaagaggtgcccactgtgtaccaggccctggcaggcgccatgatttccgtatctgggtcttcctgcctcctcttgctgtatagacttggggcccgggcgggtctgagccacagaaagcacacagctgttcataacaaccacgagaaccacagaagatggctggtggccccaggaggcagctgagaccccgggcagggggttggcctccaggccaggctcaccttggggtttttcttcaggtgcaggcggtggccccagtgcggggtcagggactgctggaccacgccccggtgccgcaggtgaaagtactgcccgtcagggaagatctggggatgtggggaagcggccgcaccgatgggacccggctcccctgctgaagcccccgagggccggtaacagcccccttctttgtccttccccagcaggtgctctctgggagtcccagaagctgagcttggctgaggcaggggtgggctgggactcttgatatttagaagaccttgtgggctccctcccccttgtcggggtctagggttgttcagtcccctccaagcccccacttcccgtctatcccggtcccacccaccggccccaggttgacgaagccgaatttgcgtgccaggcgctcgacctcccggttaccctgggacacctggacggcccagctgctgacatagatgggggctcggaccggggcccaccccacagcccgggggcggacaagggccagggccaagaccaggcgcagccacagcgcaatcggggcgggccgcatggaggcggggcgggagcggggcctgcgcaaatcccctccctcccgccaaaccgccgagtgggcccaggcgtccgacccgcccccggcgccatagcaacgcagaaggcttcgactcccagggggccttgcggctactcagccaggaggggcgcgaagatctaacagaagcgggagagggacgcacgcctgcccgtcttccgcagacccacaccctcgggagcctcagttttcccatttgtacaacgacaagactaacccagagaagcgggttcactgttgcgataacgcgtcctaccctttgtttgacctctcccactttccaacacacccctccttcgagaatcagcccggcctcctgtccggcctaatcagaatcattcttttgcgtaatcccgcctcctccgataagcctcgccccgttcccgcccctaccattccgccctgcctcctttgtgatcagccccgccctccactggtctcgccaatgaatcgcgtcccgtttctccaatcggctcggatgtttctttagcccctccccccggttccgcccccccacgcctctcctcgccctggctccacccttcagccaataatcccatcctctgacaccgcccttccaatcagctacgtctcgctccggcccggccaatcggtgccctgggccgccgcgccccgccctctcccggcggggtctgggcagcggcggccgtggcggagggctatgcggcgggggagacggggcaggcccctcctcctttgtccgccctgccctcccattggtcctagcggggggccgggggcggacaccggcgcggggccggagcatcgcggctcaggctgcgggaaagcggtgcgcgtgcagcggggtgggtgccctggtccgcgggcgagctcgagcagccaaccccgggcgcgtcggggccatggacggcctgaggcagcgcgtggagcacttcctggagcaaaggaacctggtcaccgaagtgctgggggcgctggaggccaagaccggggtggagaagcggtatctggctgcaggtgagccgtcggcgctagcccgtttcgccgacgggcacaccgaggccatgggcctgggggtcgcagaccggactccttccccggctacggggtccggtccggccggtggagcgcgcgaggtgactgggacctcgaggtccgcccgcagcccttcccttgcccgcgccctgcgaccctgctcccgggccacccctctctagcttccgcccctggccgccccccgacgcctccttccgggcgctgggtgcctgccatgccgaagtccggttcttccagttgcccagtggccccagaggggtcgggatgccagtgtcctgcgcgtttcgccgtcccccttcccccgtggaccccggcctggctgcaacagtagagatcttcccgtttttctgaggggaggctcctggcgggaaggggaacggaccgtcctgggggcctgcccaggacccttctcctttcctcctcctctcctgccctagctcaccttcccccagctcaatggcttagtgccaccgagcgtaaatgtttgttaagacggagttgggttgtctgacggctgtgatgtggggaggctggactggggcccacagagccggagatccaggcaccccgattgtgactccattacagttcttccgtgactttcacccttggtgacgctgcgcgccccttcccctttccaaatctctagcaagagcatgtagtaaacgctccttaaatgcctccctccccacctttaaaacttttttttgagaccgagtcttgctctgctgcccaggctggagtgcagtggtgtgatcttggctcactgcaacctccacctcctgggttcaagcgattctcctgcctcagtctaccaagtagctgggattacaggtacccaccaccatgcccggctaacttttgtatttttagccgttcaacatggtgaaacggggtttcaccatgttggccaggctggtcttgaactcctggcctcaggtgatctgcccacctcggcctcccaaactgctgggattacaggcatgagccaccttgcctggcctaaaactttttaaaattaacttttttaagagacagggtctcactatgttacccagactagtcttaaacttctgggctcaagcgatcctcctgcctcagcctcccaaagctctgggattacaggtggaagccactgcacccagcctttcttccgtttgtgtggtgctcccagccccactggctctgccttctcttccaggaagctccgcagaatgactcacaaggacttgctctgggcctggggtattctgggtagaggacagtgccacttttttgagcaccttctgcaggtggatcccaggagtccagttcccccccaattttcccaccatctgggggttcccatgccaggcagcgccagaacagtctgaagtctgtgcccacaccctggaggtccccaggtgcctggtcccatgtgcagcgcagcaggtggcatgggcatggcccggctgtgcctgcccccgggagcaggtccctgacctctgccctccctttccacatccctggggctagtgggcaggaatttaggtcgtagagcgcccaggaggcaggcagcagggaggggctgcctggggcaccgtgtcaccagagacgaaactgaggcacagggaggcaggggctgcctctgtgcctgttctgtctgaagcatacagtcctccaccctgcccacccccagtcccatctgctgctaatcttgggggctgggcctccctccacagttctgatgtccaaggtcatcctcccgtcgctgaagctgcaggaaaagggatttaggggagggacgccctgggagagtcattcctccccacgagccaggcccggggagagatggcagtccctcatccccatctcccacctcctttaaattgacaaatcccacacccctgggtaacatacgaagaaactcagaggggacagtgactgggaggccactcctgggaccagctgggggactcctcctacccctgaccttgggtgcttttggataaagactaaagcaggtgggaggggctggggggacttgggcctctgccctttggtccagaagtggcctctatctcactctgcagatagcagccccaggggaggaggaagaaggctgtccaagctctctggagcacataggttccctgtgtgaccttgggcaacacccacccacccccagttttggctgttgaataattcaggaaaagcacaaaacctggcacacaataggcgcttaataaatgcagctgtcgtagtcattcttttcagagccaggttcaggattggggctgagctggacacacacacacacacacacacacgtttttctctgaacaccctccttgctgggactgtgttatagttgcctgaaggcacttaataaatgtgcagaaaggctgatggcggtggctcacgcctgtaatcccagcagtttgggaggcca[134 bp omitted]aatcacttgagcctgggaggcgagcttgtagtgacctgagattgcgccactgcactccagcctgggtgacagagcaagactccatctcgaaaataaatagaaataaacgtgcagaaaggcgttctctctgttaacttgtaaccataggaggcaggggccattactactcccacttaccaagggggaaactgaggctccatgcagccacagcctcactcagtgccggctggtgagtgcacacccgaccaaagggctctcctccacccaggggatcgagatgctggggtttgctgcctccaagacaggaggttctcaaagggggtagccctgccccccaccccgccccaggggacactgggtgatgtctggagatacctgtagtcgtcatgacttgggggctgatggcatggagtgggcagaggccagggacactgctcagcaccctgcagtgtccaggacagccacttccccctctccaccgaaaacaaccaagaatgacccggccctgaacatcagcagtgccaaggcagagaaaccctgcgctaagataacagatgaaacagttgcctttctcagctctagaatcaagtcttcatgacagcctggcctcccttgcaggtttctgccatcccttatattgaaacactggcctgttttcccagtgcctcccaaagggcctggaatgagatggctatcgttgcagattacacttttttttttttgagacggagcctcacccaggctggagtgcaacggcgcgatcttggctcactgcaagctccgcctcctgggtttacgccattctcctgcctcagcctccccagcagctgggactacaggcacacaccgccatgcctggctaatcttttgtatttttagtagagatggggtttcaccgtgttagccaggatggtctccatctcctgacctcgtgatccacctgcctcggcctcccaaagtgctggggttacaggtgtgagccaccgcgcccggctgcaaacacttcactgggcagctattccgcacccacccccactgcccagcgtcgagctcctgcctgcccttggggagctctcaaccccggtgggggacatggacacgttgaccagttacaggcacaaggctcagggcctagaggcacgatgggggatgtacaggcacatcaggggcagtggacatatcctggaggcggctcctgggaggaggtgacggttgcagtcttcgtcgactgaaaggcggcctgggtaccgtcgtgggggctcagcgggtccccagccctggcacaccaccgcctctctccggcaggagccgtcactctgctaagcctgtatctgctgttcggctacggagcgtctctgctgtgcaatctcatcggatttgtgtaccccgcatatgcctcgtgagtgcacggctggctgcccacgcggggggttctgggggctccctggcagcccctgaccctgctgcaccctccctgcagaatcaaagctatcgagagcccaagcaaggacgacgacactgtgtggctcacctactgggtggtgtacgccctgtttgggctggccgagttcttcagcgatctactcctgtcctggttccctttctactacgtgggcaaggtgggccctgccagggcgggcacagccgtggagcgcatggggcttggggattcctgggaggcgctggggccagaaagtccggaggataccaggagatgggggatgtgaggggaagactcagtcccttccctggggaaacgagccctgtccgggggctgatggtggagggcccaccctgaagggtgtctgatggtggagacccaagcctgctccaataggatgtccgatggtggagggctcaccctacaggatgtctgatggtggagggcccaccctgaagggtgtctgatggtggagacccaagcctgctcaaataggatgtctgatggtggagggctcacttaaagggtgtctgatggtggagacccaggcttattccaataatatgtctgatggcacagggcccacccctaaagtgtgtctgacggtggagacccaggcctgtcccagtaggacgtctgatggtggagggctcactctagagggtatctgatggcgaaaacccaggcccatcccaataggacgtctgatggtggcgggcccaccctaaagggtgtctgatggtggagacccagtgcctgtccaggatgggcatctggtggagtggtgcagcccctctccccaccaggggcacagagctgggtgggcccgcgtgtaactcctgccccgccctgcagtgcgccttcctgttgttctgcatggctcccaggccctggaacggggctctcatgctgtatcagcgcgtcgtgcgtccgctgttcctaaggcaccacggggccgtagacagaatcatgaacgacctcagcgggcgagccctggacgcggcggccggaataaccaggaacggtgggtgctcgcaggcgcctggctgcctcaggccatctcccgggtctggacctgtctctctccaccttgcctccctttctgactttggccgccccctctcactgtccgcctctctctctcacgcttccgggaaccagtcttgcaggtcctggcccgtagccgggcaggcatcaccccggtggctgtggccgggccctccactcccctggaagctgaccgtacgtaaccgctgtggggagataggagctgtgtgtgtgtgtgtgtgcgcgcgcgcgcgcgtgtgtttgagcgtatgtttgctgtgtgcacatgtattattgtgtgtgcatgttttgtcatgtgcaagagggtgcgtgtgcatgggctcaagtgtatgtttggtgtgtgagtgagcaagggagtgagcatgttttctcacgtgtgcatatgtgtgtgtgtgcccacgtgtgcatgtgagtatatgtgtgtgcgtgtgaccatgtgtgcacgtgtgagtgcgtgcgtgtgcatgactgcacatgcgtgtgctctgtgtgcacccatctgtgcatgggtgaccatgaaagcctctgtgtggttgacaccatctctgctgagggtggctgcccggcccctcgacttgtcatgctcatagccagtagcctcagtcccgcctgcgagcagctccggggagcccaggcctgcctcacggccctcccccacccgcccctctctctgcagtcaagccaagccagaccccgcagccgaaggacaagtgaagcagccccctgagcctcacaaggacctcctggctggtgaggagggggccgcgccaggctcccaggcctccacagagtcttcagcgcatcccccaacagcagcccctgccagtccctcgggtccaggcaaggccctgggggtctccttaaatgccacctcgggcaagtcccagtcccagtcctcggccacccccagctctggatcccagggccagctgccctctggctctggctgtggctcccgcctgtccggcagggcccagggccagcgtcgggcacagggcagctcccactggtctcggcaacacacccagccgcctggtacttcctccagcccctcccagtcagccctcccgtcctcggggcccctgcagccacccaacgtcacctccagcccggtctcacccatggtccagtctcccagcagcagcaacatccccacgcagccccccagcaagtcctctggcaagccggaggacgcagcccccaagaccagcggacagcgccagaaggaatcgtcgaaacagcctgccagcagcgcctcagtgcccgagctggtcccctgccattccgggacctctctggagtacacttcggagtccaccaccgagatcacctgcagctggccacaccacaggcccccgtgcctgcagcactactggtgcctgaaacacctggcctgctaggaggctccaataaagctaacccggaccagacctgtgtgccacgtgtgcggggggcccaggggaggggctgcgagggcaccgtcccatttcatcaggcatgaatcccggctgtgccgaccagccccataatatagatgaggagactgaggcccagaggctaattcacccactcaaggtccacccacatggccaggatgggtgcaagccccggaaaagcttgtccttaatcacagtgctttctctcctccctcccgaactagttgtctggcctatttgcattagcctgcttctcttaaaactcccccatttgggtgcggtggctcacacctgtaatcccagcactttgggaggctgaggcaggtggatcacctgaggtcaggggtttaaaaccagcctgggcaaaatggtgaagccccatctctactaaaaatacaaaaattagccaggcatggtggtacatgcctgtaatcccagctacctgggaggatgaggcatgagaattgcttgaacccaggaggcagaagttgcagtcagctgagattgcgccactgcactccagcctgggcaacaaatgaaactccatctccaaaaaaaaaaaaaaaaaaaaaagtgagtaggataaaccacaaaccctgatatattttcccaaggggccataactcagttattctcaacccagaacagttttgtcccccggcctttgggtcttgtctggagacacttttttttttttttattgatcattcttgggtgtttctcacagagggggatttggcagggtcataggacaatagtggagggagggtcagcagataaacaagtgaacaaaggtctctggctttcctaggcagaggaccctgcggccttccgcagtgtttgtgtccctgggtacttgagattagggagtggtgatgactcttaacgagcatgctgccttcaagcatctgtttaacaaagcacatcttgcaccacccttaatccatttaaccctgagtggacacagcacatgtttcagagagcacagggttgggggtagggtcactgatcaacaggatcacaaggcagaagaatttttcttagtacagaacaaaatgaaaagtctcccgtgtctacctctttctacacagacatggcaaccatccgatttctcaatcctttccgcgcctttcccccctttctattccacaaaaccgccactgtcatcatggcccgttctcaatgagctgttgggtacacctcccagacggggtggtggctgggcagaggggctcctcacttcccagtaggggcggccgggcagaggcgcccctcacctcccggacggggcggctggccgggcggggggctgacccccccacctccctcccggacgggtcgactggccgggcagaggggctcctcacttcccagtaggggcggccgggcagaggcgcccctcacctcccggacggggcggctggccgggcggggggctgaccccccaacctccctcccggacgggggcggctggccgggcggggggctgacccccccacctccctcccggacggggcggctggccagggtggggactgacccccacctccctcccagatggggtggctgccgggcagagacgctcctcacttcccagacggggtggctgccgggcggagggtctcctcacttctcagacggggcggctgggcagagacgctcctcacctcccagacggggtcgcggccgggcagaggcgctcctcacatcccagacggggcggcggggcagaggcgctccccacatcttagacgatgggcggccaggcagagacgctcctcacttcctagatgggatggcggccgggcagagacgctcctcactttccagactgggtagccaggcagaggggctcctcatgtcccagacgatgggcggccaggcagagatgctcctcacttcccagacggggtggcggccgggcagaggctgcaatcttggcactttgggaggccaaggcaggcggctgggaggtggaggttgtagtgagccgagatcacgccactgaactccagcctgggcaccattgagcactgagtgaaccagactccgtctgcaatcccggcacctcaggaggccgaggctggcagatcactcgcagttcggagctggaggccagcccagccaacacagcgaaaccccgtctccaaagaccttgtctccaaaagaaaaacagtggtcagtcaggcatggtggctcacacctgtaatccccagcaccttgggaggccaaagcaggtgaatgacctgaggtcaggagttcgagaccagcctggccaacatggtgaaacactgtctctacttaaaaatacagtaattagccaggcgtggtgggacatgcctgtagtcccagctacttgggaggctgaggcaagagaatcacttgagcctgggaggcagaggttgccgtgagtggagatggtgccattgcactccagcctgggcgacagagtgaaactccatctcaagaaaataaaaataaaaaggctgggtgcggtggctcacgcctgtaatcctagcactttgggaggccgaggtgggtgaatcacgaggtcaggagattgagaccatctcggccaacatggtgaaaccccgtctctactaaaatacaaaaaattagctgggcatggtggcgtgtgtctgtaatcccagctacttcggaggctgatgcaggggaatcgcttgaacccgggaggcggaggttgcagtgagccaagatagcaccattgtactccagcctggcaacagagcaagactctttctgaaaaaaaaaaaaaaaaaaagagtgttccaggcagagggcacagcctgtgcaaaggccttgaggcaggaccacgctggtgagtgggaggcacagagaggaggctcctgtggctggagcagagaaggggaggagggaggaggggaggagggaggagggaggaggggaggggggaggaggggagttttcggggctgcaccacacaggcactgggggcggggggtgcactttgtcttttttttttgagacagagtttcactcttgttgcccaggctggagtgcaatggtgggatctcagctcaccgcaacctctgcctcctgggttcaagcaattctcctgcctccacctcccgagtagctaggattacaggcatgcgccaccacacccagctaattttgtatttttagtagagacagggtttctccatgtccgtcaggctgttctcaaactcccaaactcaggtgatccacctgccttggcctcccaaagtgctgggatgacaggtgtgagccactgtgctcggcccgggactttgtcttttactcggggtgaaggatttatcagagcaaagggcaagggtaatcattaatcaccccccaccctgtgtcggtgatcacacggggatggcagacggggctctcagaatctgccgatcactggcccagctggtttgaagaatgtggtctggtcatggccctgagggaggagagagggtgccaggctcgctctgcacctggcatggtccctcactttcactggcggggagcagcaaaactggctctggcctgcccaggtcagcacacccagggagcacaggtggggaggaggacacacttgtcttaccaggtggaaatgtgacctttagcccctcaggcattttattttatttttattttgtattttttaaattttatgtttgagacggagcctcgctctgtcacccaggctggagtgcaatagtgcaatcttggctcactgcaacctctgcctcccgggttcaagtgattcttccacctcagcctccccagtagctgggattacaggcgcgcaccaccacgcccagctaatttttgtatttttagtagagacagggttttgccatgttggccaggctggtcttgaactcctgacctcaggtgatcctcctgcctcggccttccgaagtgttaggattacaggcgtgagccactgtgcccagctctttttatttatttacttttatttttattttctgagatggagtctctctctgtcccccaggctggagtgcagtggcacgatctcagctcactgcaacctccgcctcccgggttcacgccactctcctgcctcagcctcccaagtagcagggattacaggcatgcgccaccatgacctgctttt[172 bp omitted]tggagtgcaacaatgcaatcacagttcactgcagcctcgacctcctgggctcaagcaattctcctgccttagctttgcaaagtgttgggattataggcatgagccaccacag[133 bp omitted]aaaccctgtctctactaaaaatatacaattagccaggcgtggtggctgttgcctgtaatcctggctattcaggaggctgaggcaggagaattgcttgaacccgggaggtggaggttgcagtgagctgagattgcgccattgcactgcagcctgggtgacaagagcaaaactccatctcaaacaataaataaaaataaaaataaataaaagaaggaaagagtggcagccaggtgcagtgtctgacacctgtaatccagcgctttaggaggctgagacaggagattcgcttaaggccaggtattcaagcccagccttggcaacatagagagacaccatctctacaaaaaagaaaagaaaagaaaaattagccacacattgtggtatgcacctgtagtcctagctacaccagaggctgaggcaggaggatcactggagcccaggaggttgaggctgcagtgggctgtgaatgcgccgttgcaatccagcctgggagacacagtcagaccccggctctaaaaaaataaaaataacaaagataacaaaacgttcgcttgtcggctttaaagctaaagcgcaaatctggagactgtttattgccgatggttacgtggttctcactggaaacaatgttgtcattttcaaatcacgctggggtcctctcgcccacgcaggaatggcgtgctcctggcggtgggggctgtgggacacctggtgcgcgtttctcccagcgcctccgtgtttctccctggccgcaggcacagcctggggtccctgttgaggaaactctccgagtgtcagctcccctggccggttgcgcagcccctagggtaactgtctgagatccaggcgccggggcagcccagggggtccgtggccgggagagaccttgaaacctccattccctgggacaccccaaaccacagccggggagaagggacagccttacagactgacaggggagggagggcagtggggtgccggcaggcaccgacagtagcctcatgagccagtgctgtcacgaggaggcctgcgagagggccccgcgtccaatgggaagcgagtgcccacgcggaagtgggctcagggcacctggggccacaagccacgaggcgcgcccggagtcccttcatgtcccgtcctgccgccagggggcactgcggcccccactcatccctgcagcacccgcggcccttggctggggagcccctgggacccccgccggcagcgcgtgctgcagacatcaatcacagaaggcaccacgtcactgaagcgccaggcctgggccgtcccaggctccgctgggtccctggtatgccgtcggtgctcaataagcacttgctgcagaaatgtgtgaaggaaaaagggggctagggaagggctccaggaaagtgtaactcccatgtcagagctgggaggggcttcgagggcatcactcactgagcgggaaactgaggctggagaggggctgcacctggcctggggtcatctgcaagatcaggggccgtgtccaccaatgtcctgcaccccttgccgactccctctgcctcggccgcctccttgcccttcaccctctctggttgctccctgcctggtgggggtagcttgtccgtgcccagtggacagcggggacccatggaccccaggcaccccaggccccagggagaaatgcaaccactggtcccacacagagtgggttgtcccgggtggcagcatgagccatgcatcaggcgtcagaggcagagggttggcaccccacggaggagggtttgctgagcgacctcgtgacaccccctagtacacacacagcccgtgtcggccctcctggttgcagaagaacatagcgggctggcagctggcagacagcagcggctctcacctgcctcctcacctggggaggggttcccagggtgggcctgagaaagtatgtggcagttgggggaggctcaggacctaccaaagccccattcattccccacctgctcctatcctcctctattccctgccctcacctcacacagtgtcagacgtgcagggaggaggtgaggctggaccaggaggaggggtggggtgcgtgtgaacatgcgtgcctacccatgagcaaggtcgagacggggttctaccagcgtgtccctgagtctctgtgaccgagtgcatgtgactggggtgcttaaaaaaaaaaaaagtgctctgcagccataaaaaaggatgagttcatgtcctttgcagggacatggatgaagctagaagccatcattctcagcaaactcacacaggaacagaaaaccaaacaccacttgttctcactcacaagtgggagttgaacaatgagaacacatggacacagggaggggaacatcacacaccgggtcctttgtggggtgggggccgaggggagggagagcattagcacaaatacctaatgcatgtggggcttaaaacctagatgatgggttgatgggtgccacaaaccaccatggcacgtgtatactaatgtaataaacctgcacattctgtacacacccagaacttaaagtaaaatttttttttaaaaagtgcttgtaaaaattaaagaggaataaaaggggggtgaacagccagtacgatagtgcatgcctgaaattccagtgctttgggaggccgaggcaggaggatcgtttgaggccagtagttggagagcagtgtgggcaacgtagcaagaccccatctctacaaaaaatttaaaagttagccgggcatggtgattcacacctggagttccagctgctgtggaggctgaggtgggaggatcgcttgagcccaggaatttgaggctgcagtgagccatgattgcaccaccgcacttcagcctaggtgacagagcaagggtctacctcagaaaaaaaaaaaaaggaggagcaagcacgtgttgatgggtggaaatccagccagaaatgctgaggctgaaaagattgtctccgagtttcctggtagccaggggaaaaggggaaattggtacgttggtacgttacagtgcctggttaggcatgtcttctaaggggcatgcctgtttgtgacagtgtctctgcccttcacacatgagggtgtgtgtgagtagcagagagcagagacagcacagtgtctgggaagtaaacagatgatcttctgggtacccagggcagcagggtgtcatgctcgttcatgacagtgtctccaagcaagtgtgacgcgcgcaaagagaaagaaagcagcgttaaactttctgagtataaatagctatgagcttcctggcagccaaggagagaggcgaaataaaagtcagagtctccttagtgcctcctcaccagtgcctgccggcttgtgacagtggctttgactgcatgcagaggtgtcttaagcgtgtgtgggagggagtcacatagctgcacaggtgggacgtatttcagagctgcctggaagccagggtgagaggggaaatacgttgacgttgaggctggtcagatgtatctttcttgctgtgtgtggccggggctcctgcaggggctcagccaggacagcgccgggcagtcaggcgtatgcggctgtcctccgcagggctccagggccgggcgtagccggcgtggggcagcagcagctggtcctgtgtgccgtcggggctgacaagacgctggacagccatcaggtagtcccggtggggtgccagcatcgggcaggggcagtggcctggcgcccacacgtactcgcgtgcccgcagtggcgagcggttcttgtagacgagctggatgcgcacctcatagcgggtctcctgggcctggtggtggtggcccagcactcgggcctggaacactgttgaggggacgtgctaagctggctggctgctcaactctgcgcaaatctctacgccccctcccttgccagaagagggactgagggtcaggtgggacctcgggatctatagggactagagtcaggatcacgtcagggatcaatgagggattagggtcaagaggcaaattaggatcagaagaaggggtcaagggtaaagtcagattagggtcagaggtcaggaggaggccaggttagtaggggctaagtcagggtagaggtcgggggtctcaccaaagtcactgccgcaatagtggagtagtcggtgggcgcggccgcgggtgtcagggcagggtgggcaggggtctgtgggatgggcggtgctgtgaggggcacaggcctcagtccccactcatcccccaccctggctgtccccacctcacctggggccagcgttggggtctgtgcaggggtgacagcaggggctgcggggggctgaggctccaccccccggggctgaggctgcctcaggggccagcccagggcctgcacacgagcctggaaggggctgtagcgctcccgagggagccagaactcaaactcgatgccagggttgggctcctgcaggaggacctggagcaggggaggggacacagggagcttcacaggaggctggggttgcctcctgcctctgaccctacgaccccagcctccccactttgatcctgtctgcccccagcctccctcctctgatgctctgtccctagctgatcccctctgaccctgtccccaccctcccccctctgatgctctgtcccagcctctcccctctgaccccagactcccccttctggccccagtcacctccactcctaccctctgtccccagcctctcccctctgtccccagccgaccccctctgaccctgttggaggcccagtggcacctgtaggagcaggtcatgggaggtgggcccggctgcttgcaatgtctcctggggccctgtgtctcgggtgtagaccacatgcgtgccggccgcctcgtaggtccctggtgggctgaccacccagtgcccattaagcacgtagcgcccatcgccccccatcagtgctgcaagggaacagtcagccctcaggaacctgtcgtctcgtctcccagaccctggggtcccctcctcaggcctcagtctccccatctgtaaacagggacaaccgcccccgggtgcccagccgggtgcctctcgcctcacatcctaggatacccaggtggttgcggctcctgtgttccacgcggatgtgtctggcgccctcggggatcagggtcacgttccagtacccagcgaaggcacctgggtgggagggtaggagggtgttggggtgccagtgggggtgtatttgagcgatgacttgaggatttaatgagctactgcgggtaagacagctagccagggtcctgggaaccggaaaaccctccgtaaacgtttggagttacaattactattgcttcagtgtggcagggaaagggttaaaaccccatctgtcctggggaagggcgggacaatctgtcagtagccaatcaggatgaggagaaaggggggctgggccgcacactggccaatcagcacggaaatttgcttccgggccacggctcgttaaagggcccactctgacgtgtgtgcagggagggcggggcaggtagtcaccggcgtcacgaaacacgcgctgcacgaaaaggcacgagtcgttggcgcctccgcagcggccacagcggtcctcgagggcacccgagcccaacaacccatcacagccggcgctctaaagggtgaaggacaggcgcggcgtcactgacgctgggaggggcaggacctggggaaagggcagtgcctgggagcaagaggacgaggcctggagggaagatgggggtggagcctagggaggagcaggacctggcgggaggaggatgggcttggcgcccgggagtgggtgcctaaggggggctgggggcagggcctggaaggggagggggaaggcggtggagcctagggagggggtggaggctaatgggaggagggcggaggtggagcctaggatgggtggggcctgagtgggaggtgggcggggctcgggcggggcctgacgagtccttacaaggcagcggccagccacgcagaccccctgggcacccgggctgcaggcggtgccgtccaggacgcggccgaagctgtggtagaaggcgtgcccctcagccaggcagttgaggtcgcactggttgggcgctgagggcaggaggagtcggtgggccggggacccctgttcgagctccagtccccctctaccaagcttcatcaggcaaccatcactttgggcagatgaagcccagagatttggccaaagccacacatcgaggctgaggcagagccaggactggaccgtaggtgctctgcgtccagcaacctgggactcgcaggcaagtatcctggggctgcattcattcattcattcattcattcattgtctttatattaggagtccttacatattattcatttttaacaccattactcattcttcattccactgaacacctactgttttccagacactgttccaagctctaggatacagaagcaagaattcaatcagtgtgcagatggatggccttaaaaaaggccaggtgtggtgtctcatgcctgtaatcccagcacattgggaggctgaggtgggcagatctcctgaggccaggagttcaagaccagcctgggcaacatggcgagacccccccgtctctaccaaaaatacaacaataaaaatttagccaggcttggtggtgggagcctgtaatcccagctactccggaggctgaggcaggagaatcgcttgaaccagggaggtggaggctgtagtgagccaagatcatgccactgcactccagcctgggtgacagagcgagactccatctcaaaaaaaaaaaaaaaaaaaaaaaaagaagatctgagcatctggcccaggcaccagcaagtacccaatgaagtgtttgtccagtactgactggactgagtcccgcacaactgagctgtgtcgctggtcctccctgggcctcagtttccccttctgcctggaagtggggcaaaatgagctgtctgatcaaacacaaaggccgacagccctgatctccactcctccttctccagctccttctggctcccatttccctgagcctggctggtggaccctgcctggaacggatcctgggctggccctagtgggcctctgcgggggtgggatcacagcaggtttcctccaattctcagattgatggaaggaaggaagggagggagggagggagggagggaggaaggaagggaagggagaaagggaaggaagggaaggaagaaagggaaggaaggaaggaaatgaggttgatggatggcactttgtccattctaggcttttcttatatctgtgtctgccttccccatggcgtgtgaagctgcctgtctccctgaaatctggaggcgcactgacccgggcacgtagttatataactcgctattttcagctcaatgcagcaacatttcctgctactgggataagtttgagaagtgttggcctctggatacagctctaagtcaatccttagttgggtgttcagccctgtgcagaatgaaccctgcttccctctgcccctgtttcacgcctaacatatgctgtttctgtttcactaactcctacatatccttcaaagccctagcactaataccctcttctctttgcaaccctccaagaccctctccctgagactaatgagttgttcgctctggaccaattctgaccacaggagaccagactactcacccccatggaagggcacccactggtaggtcttctgggtgcccaggacagggcggccattgtacagggcacactgtaggtctcggaagggcacagcccctggggggcagtcctagggacagagataggtgagccagaggctgggacaaccccaaggggcaggtggtgggcttcaggcagtctggggtgggagagtggtctgggaggtgggcagggcttactggcaactggcagaggcggtactcatgggagtctccccagcacggttcttccccaggaagcctgaagggagacagagtgtggcgagaacccccagggaccccctcccagggctggccttccaccctccgcccccgccaaccccacccgcattccagcgggatcagggggattaaagggcacagcatgtgtgggcaggccgagggtgcggccaggggccgggctgggccggcgggggaggaggggcagggaccccctccgggccccgctcaccggaggcagcgccggctgcgcacagagacgccacgcccgcaggagctggagcagcgggtccaggacacccacggggtccactcgcccggaccctacttggggagacagaggcacggtcagccttgtagggggacgctggtgaccccacactgctgactgggtccccattcccactcgccaccccctgggctcatgcccccccttacctgagcactgacccccaaaccacagttcagcagggcccacaggaagagcaggaggttctggaagaggtggggcctggggaacagaggggccgagtccatagagccaccgccagagacacagggttgtgtcccggctctgccctgactggctgtgtgatcttggaaagtaactaaacctctctgagccctacctctcgtctctgaaaaacggggtaatagagcctcccttacaggaaagttgaggggtcctgtggatcaggtaaagaagacaggagacgtggagcccggtatggagaggaagaactca[133 bp omitted]gcctcagcatcccgagaagctaggattacaggtgcctgccaccacgccggactaatttttgccgttttagtggagacagggtttcaccatcttggccaggttggtctcaaccttctgacctgaagtgatccacctgctttggcctcccaaagtgctaggattataggcatgagccactgcacccagcctacaatattattgatatgtgtattgtgctataatgcagacagtaggtgcttaatcgatgcttgatgattggagggatcattcaaaaatagtacacaggtgcctcctagggctggggccccctccccgccctccccaccatcactgcttctacctttccgtgtggcctgaggccagccactccactctcccaggcctcagtttccccatctgtgcagtgggggccaagtggactcagtccatgattctgtgacaccctgcggaaggtgcggccggcaggggctggatcaggagttgggtccctagaagaggccctcagctgcaccccggccccagggctccctcagctcccagacagcagggagtcccccggattggggatgggacagggagggggtgacctggcccaggtccgttcggtgcctcatggcctcatcggcggagggggtgggactgagctccggggcagcccgtggagggaaggggccactgctgaggctggagcagggaaggggaggaggctgactgcctctctgggccttagtttctccatcctgtcagggcagggatgaagtcacttgccatccacaccctcctcatgaccccagcctgcagggggaaagaggggggaagggaagcagccgccaagtgagccagggcgtcctgctgccagcagagcctgaaggcaggtgggtgagccccggcccgggcaccagctggggaagaggctgggtcccacctggaccctgtttccctggctccagcatttggacttctgaggcaccaagggtctagggtcctgggtatctctaggtactgagacagctgtgtggtctgctgcatccgtgcccctctctgagcctagagcctgggctggc[148 bp omitted]atggtaaaaccccatctgtactaaaacacaaaaattagcccggtgtggtggtgcacacctgtaatcccagctacttgggaggctaaggcaggagaatcgcttgaacccaggaggcggaggttgcagtgagccgagatggggccaatgcactccagcctgggcgacatagtgagactcagtctcaaaaacaaccaaccaaccaaaaaaaacagggggagggggcttgaccttctgaccacccccaccggactctaagcctggtttgaggagtgggggtctaggtggtgaaaagtggggggctacaaggaccaccctaccccctcctcaatgggccctgcccagaatcaaggctctcccctccccgtgtgggctgcagcccggactggcggagggatctcaaggcaagccgcacctctgggcctcagtttcccccggagaaagtgggaggataggcagatggacttaccggctgcgcggagcccaggcagcgcgtcccggctccctgagcggccccagggcgagcggaagcggcggggcccaaggtgctgggcggggtggggagcctgggacggtccctcccaccgcggcctccgcaggcgcgcccaggcccgggtcaggaggggcggcggccccgggcgccctcgcgcggcgggcgcggatctgcggcaggggactgcccggcggacgcgagcgcaggggtcccggagccgcaggctggtgtcgggcgcccgggtccgggtgaccttggcaggctcgggcgggggcgcggcgcggggactgaccgccctcctctgccccggggctgctattccgggcgccgcgctcagggcccgggaatgtgcgcgaaccgaggtcaccccgccctgggtctgggagtcccgggcgctgcccctaccccgccgacgcccggattgcgtcccaccggcgtccccatccccggtcacagccccctcccctggtcctgcccctcacccctctcgcggggggtcgacctgctcgtggatggggaccctggcgcgcctgggctcccatccgggggttccccgacccaggtcccggtcacccccagcgcagggccccagcgcactggggagaggctcggccccgtgggccgcgcgcggggggcggagagaccctcccagctggcgcattcccgggcgctgctgtcaccaggggacgcgccccaccccgcctcccgccctccctgccgggccccggggctgccagcggggcttcagagccagacccgggtccaggcggtccctctccctcacagccgcggccacaccctctccggcctcagtttccccatcccagcagtgggcccggcagggatctccaccgcgaaccttccatctggaatccggctctgcgcggaccggcaacgcgagggggcaccccgggactccccccaccccaccctttcccgccgggcgtctgtgagccgccccgtgcccacccacgcagggatgagaccaggccctgggttctgggctccaccagtttctggtgtcgccccacggcgccccctggcgggcgggctgagggactggggcactaaaggagggggtggagggactgtcctgctccctgggctccacccaggctcggtctgagcaccccctcctccaggaagcccaccctgctgtcccacagcgctgaccacagggagagaggtttgctggggacatacagggtgttgctggtccaactcagtctgccctccagcctgtagcatgtcagcagagccacccatatgccatttattgagcacctactgtgtgcacagctgtgaacaacccagccagtcccaggccagcgggtaaggcagccccctggaatgtatgaccccccaccttctgacctggactattggagaaaatagcccaggcccaccactgatggccccaggttggggggtggtggttgcggggatgtcaagaaggccctcactgaaggggtcaagagagaagggcaggccgggcgcggcgcctcatgcctggaatcccagcactgtgggaggccgaggcaggcggatcacctgaggtcaggagtttgaagccagcttggacaacatggtgaaacccagtatctactaaaaatataaaacttagccaggcatggcggtgagtgcctgtaatcccagctactcggaagactgaggcacgagaatcgcttaaacccgggaggcagaggtggcagtgagccgagatcacgccactgcactccagcctgggagacaggcgagactccgtctcaaaaaaaaaaaaaaaaaaaaaaaaggaaagaaagaaagaaagaagtcagctcaggacatgtgtcaatgtgtcattaggacaattgtatcctcctcagatgtgccccattcccagatgtccagtccacagagctccactgggagtgcagacagcaggccctgtgccccgcagggaaggtatacagaaagcacagcgcccacagggagcacacacagcaggcattatgctctgcaggaagggtatacagcaggtgctgcatcttgtagaaatgcatagagtagactctgccctgcaaaggagtgtatacagtagatatggcaccttcagaggagtgcatacagcagtcactgcatcctgtagagagtatatacagcaggtgctgcatcctgcaaggaaggtatacagcaggtgctgcatcctgcaaggaaggtatacataaggcgctgtctcctgcagggagcgcatacagtaggcactgagttctatggaaagtgtaccccgcagcccctgttccctcctgggagtgcataccgcagccactgcaccctgcgtgggggctctagagctggcaagattggcagaggtggtggtgaagatgtggagggctgccccccacccccagttcttgtcccctaccgtctcccacctctgtcctctggatgtccctaggaggaggctgggagctcagcctaagacacccggtgtaggtggagggggtggctgctgaggctcagaggctcctggggtcccagttgggcggggtcccagcttactacattcccctgcccttgcctggaccctgacccaggaatcagccgagtccccctactctgaatttcagcctggaccccctccttgaggcagcgtcagggctagaggggagactgagacgcgggtcccggcggatgtggatcaattaggttccatttccttcatggttgtatggccttgaggcttaaggaatgccgcgatctgctgtgtgactgggctacagtgaacagtatggtaccccacacttcaaactgtgttcacagggtagatttcatggtaagggttcttaccataaaagaacaaaaacagtgggacacaagggacctcgggaagtgacaggtaggcctgtcatcttgagtgt[134 bp omitted]ccagcaaggtgaaaccccgtctctactaaaaatgcaaaacctaggacacggtggtcccaggatacctcaacctcctgcgtggactgggtggggcctccccatccctgccccacagacccctggaccccccggtccctggggctgtccgtctgttcctgggcaccagcaggggccacgcagagttgggaccctccccggctggagtcaccccatgggactcagggccctggaccctccttggccgctgctcgcccggtcctcattctgtgccggtttcttgtgcacgctcggaatctgttccctgcaggcacccagtgccccgggcaccgtccagaattcctggaagagacctcttgctttcttaccccactgcccaggctccaggcctgtgacatggcctccccagggtgccccttcccctccaccttcacgtgctgaaaaccacctgttctgtcactttcaggcgacgtggatcaggtggactggcccacctcctccattgtgtatgacgtaacccatgcttggccaaacagataattccatctcctagagacggggattggctgggggatgaccatgtgacccaagtgggccaatgagagcctgccctgggacttgaactgggccattagaggaaaaggtggtttcccgtggctggggtgggctccagggatggcgtgagttgaggtaggctggactttcttgactgctcgaagagatgcactgtctcaagcagatgctgacagacggcagcaaatggaaggggccagatttcttttttttctttttatctttctgtccttttctttctttttttacttttttttgagacagggtcttgctctgtcgctcaggctggggtgcagtggtgcaatcacagctcactgcagccttgacctcctgggctcaagcgatcctcccacctcagcctcccatgtagctgggactacagatgcatgccatcacatctggctaatttttttgatctttagtagtgacaggatcttgctatgttgtcccgacccaggctggtctcaaactcctgggctcaagagatgctcctacctcagccttccaagtagctgggactacagacatgcatcaccatgcctggctaatttttatattttttgtagagttgggggtctccccctgttgcccaggctggtctcgaactcctgaactcaagtgattctcttgcctcagcctcccacactgctgagattgcaggcatgtgccacccaccgtgcccagcccaaaagtctagatttctgagaaggttgtttgagttcctggattgagcctcatctgaaggcattcatccattttttttcactttagcaatttttagtttcttactttttttttttttttttgccagggtctcgctctgtcatccaggctgtactgcagtggtgcgatcttggctaactgcaacctctgcttcccaggctcaggcaatcctctgggatcagcctcccaagtagctcggactacaggtgagtgccattatacccagctaatttttgtatttttagtagaggtggagttttgccacgttgcccaggctggtctcaaactcctgagttcaagtgatcctcccaccttggcctcccaaaatgctgggattacaggtatgagccactgttcccaaccttattttagaatttttaaaaaatttttattattatagagacaaggtttcaggaacgaaactccgtctcaaaaaaaaaaaaggtgataacaattactatttcatgattattgactaaattccaaatgttattttatttggatttggatttcaccaggcttgtttttttgttttttttttttttttcagatggagtcttgctctgtctcccaggctagagtgcagtggcgtgatctcggctcactgcaagctctgcctcctgggttcacgccattctcctgactcagcctcccaagtagctgggattacaggtgtgtgccaccacgcctggctaaatttttgtattttcagtagagacagggttt[133 bp omitted]ttctgttcctggattccataagacattgaactatttgtctcataattagtaaaaagacccatgcagattaaaaatggattatttctgtggtaatcgggtgggttctgatgcccatgcagcaccttgaacacggctggagttgatgagtatccctgatgggaagtcgatgctgcgtccatggagagaaggggcacggggttgagtgtccacccagcacctaatggagatacagaccctctccctgccactggcgctccctgtcaggtgggacagacaccagcaagctagcaaggaaaccatcattctgggttgtggtggaactggggagaagcaggcatggatcacgtctagggcatcttggggcaggggcggcctcctgggcacaggtggccctttcctgcctgggcctaaaagctaagaagaggatgccaggcaaagtctgggagggtggcagagggaacagcacatgcaaaggccctgtggcagggtgagcttggtgtgcgtctgaggacaaatgggaaggccagaaggttgatgtcttggccttgtgtcctcatcttgggtggtcaactctggggaatgttgtattcagttcctcagagggtgcctgatgagtgtgggactcagggtgccccgggggtacccagctcccaccctgctccctgaaccaactctctgcactaaagccttgcttcaggctctgcctttgggggaacccacacagatgggccaggagggttgagtaacctgccccagctgccagtgctaaagccacccacctggacaatgtcagtggaggaagtgaagagagtgggtgagaggccccaacactgaaccccaggctcccaggagaaggaggaggtggcttaaaggagaactggaaaaatgcatccagaaagatgggaaggggccaggcgcggtggctcacacctgtaatcccagcactttgggaggctgaggtgggtggattacctgaggttgagaggtcgagaccagcctgaccaacatggagaaatccggtctctactaaaaacacaaaattagctggatgtggtggtgcatgactgtaatcccagctactcagaaggctgaggcaggaaaatcatttgaacccgggaagcacaggttgtgctgagccgagattgcgccattgcactccagcctgggcaacaagagcaaaactccatctgaaaaaaaaaaaaaaaaaagatgggaaaacatcaggagcaggggtgtcccagaggacaagagaggacggtgcttttattattattatttttttttttaattttttttttgagagagagtctcgctctgtctcccaggctggagtgcagtggcacaatctcggctcactgcaagctccgcctcccgggttcacgccattctcctgcctcagcctcccgagtagctgggactacagccgcccgccaccacacccggctaattttttgtgtttttagtagagacggggtttcacagtgttagccaggatggtctcgatctccttacctcgtgctccacccgccgtggcctcccaaagtgctgggattacaaacctgagccaccacgcccggccacttttattattaattattattattattgtttttgagacagggtcctgctctgtcacccaggctggagtgcagtggtgccatcacagctcactgcagcctcaacctcctgggctcaagcaatcctcccacctcagcctcccaagtagctgagaccacaggcgtgcaccactccacccggctaactgtttattttttgtagagaaggggatctcgctgtgttgcccaggctagtctcaaactcctggactcaagggatcctcctgcctcagcctttcgagtagagtagctgggattacaggcatgagccctgcatctggacaacagtgcttttaggaggaaacagagttgagagagggaagaacagggcttggtttcggggcaccaagtctggacgccccctcctgcgctcacactgggccatgtcgtgcagcataaaccacaatcagtgggggtctctggagccctgtggtggtggtacgtctcctgcctgctctgctcccagggccatgggtccctgggcacctgcgtggtcaggcgtccaggcacgtgagacccacgggtgcttggtaaaggccaggagaccaggcagggaccagggagctgggctgagtcacattggttggtggcctccaccctggcgcctgccggaaggagggtgctggggaggcctgggccgccgctgacctcggaggcagccccatgagcctcctgggcctccagggagtcgggtgcctgctgtctcagctgccacgcctccacctgcagtaggtattttgagcaaagcttcccggcacttctccgcaaaatccgctgagtctgtggttttctcaggtcagcaaaagaacagagactggagaggaaatcgagcctgtggtctgggatgtgagaggtgctgggggtacaggggctgcagtgctagaccacccaggcctcaagaacccagggcagggggtaggatgggagggccaggtggccccattgaaccctgccctgcccctttgcaaaacggcatcctgtgctcatcacacaagccgtgcctcagtttccccatctgtaaactggggcattagtaggactatg[282 bp omitted]gcctcccaaagtgctgagattacaggtgtgagccaccacgcccgattaatttttgtatttttagtagagacagggcttcgccatgttggccaggctggtctcgaacttctgacctcaagtgatcctcttgccttgacctcccaaagtgctaggactacaggtgtgagccacagggctcggccaattctttttttttttttttttttttaacctttgaggtgaaattcacataacataaaatttaccctttttaaaatgcacaattcagcagcatttactgccctcacagtgttgaacaagcaccccctctatctaattctaaaacagttcatcctcaaaaggagacttgtacccaacagcagtccctccccatcccctaatctgtgtaagaggccttcagggagagctgaggggtgtctttgggggcattcatccttagccccccaaaactcccctggggcaaggctgtggtgagcagccagcctggggcagggcgggggatggggacagctggttaggagggctcacataggctgggggacagagtccctgctcagaggggcacaggctgggactaggaggcctttcccagctccatagtggagtctcagccaggaaaagccgcgggcggccaggggagagggagggcgagccggtctctgtgcaaggagcatcagctgacaggcgggctgcgaggctctgggccaggaactctgatttctttccccctaggaagctcagacacccgcctcagcacgagggccttgcctggcactgctccctgggactgctggggctggcagcctgaaagagggacagacctattgtggggggaccaggagctctggattcactcccacctagactccaggctcagccacatgcagtccgcggtgatcctgggctggcaccggacgttcggagcctcagtttcctcatctgtaacacagggctaagaacagcacctgcctcagggacaagttactgcccagaacgggcctggctcacttccttccacctccaaagctttccttgacccctgacttggtgaagtcttggacgttcttgcagtccgttaagcagtggtccttttacgaggacagggctgggtctgccttgggctcgcacagcctgacacaggcccatatgcagtaagtgcttaacaaatgcctgaactgatgccaggatggactggtgctatcaggaaggaaccggaagccaggcctggtggctcacgcctgtcatcccagcattttgggaggccgaggcaggcgggtcatttgaggtcaggagtttgagaccagcctgaccaacatggtgaaacccgtctctactaaaaatacaaataaataaatacatcagctgggtgtggtggtgcatacctgtagtcccagctacttgggaggctgaggcaggagaattgcttgaactcgggagatggaggttgcagtgagccaagatcacaccacggcactccagcccgggtgacagagcaagactctctttcaaaaaaacaaacaaacaaaaaaaaaagcaaggaactggctttctgcccctggaggattccagggtgacagtcgtgtgacagctcagacactcgggccccgagcagcccaccttgcagccacctcacctgattctcatcagcaggggacttgggctccccagctgcaacccggtggccccaggctggccaggaatcttccgccctggccctgggaccagaaaccccgcaaaggtgcccgagctcagccccgtccaatgcacgggggccccattcgtgacaccaggtggacacgtgacggctcagaaggtgtttcctgtccctagtggtgtggccgggccagattccgaaatctggtccctggaaaattccagccccacggagcctggtaacccctccccattcctggtgttatgtaacatttggggattaataccgcaggcgtccaggggcggctgccgggattcaaacccagcgctgccctttcctgggctgactgagcgactttgcgtccctgggtctcaatgtcttgcctgtacaatggggacaaggcccgtttttgtgtcccaggctgggtggaagggtgagggaagacctcaccaggaaaggggtgcacctgagtctggggcagggcttggagcaaccacccccacgattccgggggagtctcaagccccccactgtcttcccacccagctgttctctgagttctctgaggtttctgatgctctctgaggtcgccatttcaaggacgtccccacctggctgtccgtgcaaaccccagccagggtccacctgctgctccacacagcccatcccttctccgggctgaagctccctcatatgggacatccactacactgtaggaccccagcccatgcgtccccaagccccggtcctgcctcctgggtccctgtcccaggcctcaccgccctccccaccagccccagcatcacaaacgctgggcttctctgccgctccgaattctgctgtggctccccagtgcccagggccatcaagccccaggttttcatgtgggccccagggacccgccagcagggaggacccgaaatggcacacattcagaacgtcgaggctcatacctcaagcgcactgtgggggagaagcccccggaagcccccaaccccccacgcgcgagagagcctcagtttcccgctcggtaaagcgggcgtatcagcggttcccagccagcccgggtgtgcagggtcggaggagctcgcgggctgagcgcggcccctggcgcccggttggcgtgcgggactcgggcgcgctctggtccgtggaacttccccagccgcggcgtccccgccgctcacgcgccccccactccacggccgggcacctcccgcccctccccgggctggacctgcgcccgggctccgccccctccccgcccccgcggccaataaaacgctccccggcggctcctgcgccctcagagcggccccggagcggccgcagcgcggtggtctcggcccggctgcgccagagtccgcgcgatggagccccggccgcggcggcggcgcaggagtcgccccctggtcgccgccttcctgcgagacccgggctcgggccgcgtgtacaggcgcgggaagctgatcggcaaggtgggaggcccgcgccccgagtccgcgacggggccggaccgggctgggctggggtcccggggcgcgcgggcgatcctgcgcggtctacgcggcgcgtccctgcgagcgcggggtctggagcgggcgcgcgtccggagccgcggggcctcccgtgcggggtttcgcatggcgggaaccgtgttgagcgcgctgtgcgtcgtgtccgtgggttgcgtgtccggggtgtgggcgtgcggctcggcctcgggatgcgacgctgtgttgcccctgggtgtgtgtgcgagcctggcgagggtctgagtgtgccgcgtctgtgcccgctgcttccaagtgtctgggtgctgtgcggtgttcgtgtgtgtgtgtgtgtgtgtgtgtgtgtgtgtctgggtgttgtgttgcttgttcacctgttgtttgtgcgtcatgcctttgtgtgtccagtcattgtgttgtgtgtctgggtgttgtgtgttcatgtggtgtgcttgtgtgtttgtgtgttcatatgtggtgtgtctaggagttgtgtgttcatgtgtttgtatctgtgtctttgtccatgtgttgtactgtgtgtccaggtgttgtgtgttcatgtgtttgtgtgttcctgtgctgtgtctgggtattgtgttgtgtgtccacacgtggtgactgtgtgtccagacattgtatattcatgtgtttgtgtgttgctgcgttgtgtatctgggtgttgtgttgtgtgtccatgcatggtgactctgtgtctgggcgttgcgtgtttgtgtgtcgtattcaggcgtggtgttgtgcatccggtgctgtcttctggtccgtggcctctatgcaccaggcgtggatgtgtctgtgtctgtgtctctgtgccttcttgtgtgcatcatgtcttgtgtgtccaggcgggagggtgggagctgtgtgttgttttttccccggtgtgtgtgtggagagacctggacgcgcctgcgtccctggctgccctgtgcctctgtacgcgctgccagcttgcacacccgtgcacacctgcccactgatctgctgacccctccccacagggcgccttcagccgctgctacaagctgacagacatgtccaccagcgccgtgttcgccctcaaggtggtgccgtgtggcggggctggggccgggtggcttcgcccgcagggaaaggtgcgtgtccccatcggtccccagggcccacagtccgcagcccgcagcgtgtcccgaagaaggccctgccctttggtcccagccctgggtggccatgagatcgtacaggaggcaggcgagcatcctgcagcctgtgccccgctgcaggcgggtacatgtcggggccgtgcctgcaggtggagcgtgagattgccctgcatagccgcctgcgaccccgcaacatcgtggctttccacggacactttgctgaccgcgaccacgtgtacatggtgctggagtactgcagccgccaggtgcccaggggcggggagagggcaggattcatgtcagctgtgcccgtctctgtccaccccgtgtccatctgcacctcgccgctgccccccgtaccatcctgtgtgccctctgctgtccattcgccagcgcttcttacgcctacgtagggccaattgtgtccatcctttactcacctgggcacacccaggctctcttgatccacctgggcccagcttacgctgtgctcatcaggcccgtctcagactcacctgtgaccgcctgggcccatcagaatgtgtttgcttcttcttggcccccttggactcacccatgcccacctgtacccaccagcatgcccctgtgcctacctgtggtcacctgcgcccctcctgcaccctgctgtgcccaccgtggccgtgaactcactgtgcccattaagtagacctgagcccacctgggtccacctgtgccagaatatgccccctctgcgttcactcctaatcacctggcccttctcaagctgacaagcatgtccaccagcgccgtgttcaccctcaaggtggtgccaggtgcggggccggggccgggcagctgtgcccgtggggaaaggttcgtgccccccctcagtggccacctgggcccatctgaacccgcatgctcctattggggtgggtcatctttgctcacctgtgtgcacctgcgctcacctgtgctcatcccataatcagccataccaccttggccaggctgagcttacatttgccttctaatccggggccgctggtcacccacagtctttggcccacgtgctgagggcgcggcagatcctgacggagccagaagtgcgcgactacctgcggggcctggtcagcggcctgcgctacctgcaccagcggtgcatcctgcaccgcgacctgaagctcagtgagtgccaggaaggggaactgtgggcgggggcgtcgggaggtgggcacggatccacccccatgcgcaatgcccctcccactgccaggtaacttcttccttaacaagaacatggaggtgaagattggagacctgggactggcggccaaggtggggccagggggccgctgccacaggtgagagccggggggagggctctgagcagtccgtccgggtgggcacggctggccctgaagtctggcacggggatcccagccttcctgagccccccatgacgcccttcctagagtactctgtgggacccctaacttcctggaccctgaggttgtctccagaaacggtcactcctgccagtaggacatctgggctctgggctgcatcatgtgagtggggtcctggagaaggtgggcagggcctccggggggggcaggtgtggcggggggggagcctgcacggaacaggtggggaccgttgtgcagggtggggcgcgtggaacaggcacctgtcgccaagtgtgcagtatgaacaggacgtgtgtggggaggcgtgtgtgagggaggacgggggagggtgtgcacagagaggtggacaggtgtgggcaggtggcagtggcacaggcaggtcagggcgtatgtgtacagggatacagcgtgtgtgggcgcagggcaggtgtgagcaggcatgggatagcattggaaggtggaggccaggcgcagtgactcacgcctgtaatcctagagctttgggaggccgaggcaggaggatcgcttgagcccaggagttcaagaccagcctggccaagttggtgaaaccctgtctctacaaaaattacaaaaattagccaggagtggtggtgtgcacctgtagtcccagctattcaggaggctgagttgggaggattgcttgagctcaggaggtggagactgcagtgagctgtgattgcacaacggcactccagcctgggtgacagaatgagaccctgtctttaaaaaaaaaaaatagaagcattgaaaaggtgtatgcaggtgagttcagggtgagccaggtgcaggcaggggatggacagacgctggtgtccaccaagcagggtccatgggactgcacagggtgccaggtgcaggcaggggatggacagacgctggtgtccaccaagcagcgtgcatgggactgcacagggtgctaggtgcaggcggatgttgggagatgaggaagccgatatgggttgcacagctaagctgtgtaggcaggtctggccaagtgtgcaggggtagctctgagcgatgcctggacacccaggttcttgccccccacctggcccaggtacacggtgctgactggcaccccacccttcatggcctcacccctgtcggagatgtaccaaaacatccgtgagggccactaccccgaacccgctcacctgtctgccaatgcgcgccgcctcatcgtgcacctcctagcacccaacccggccgagcggcccagcctggaccacctgctgcaggacgacttcttcacacaggtgggcggcggtcctcggcgtggggtccctggcgtggggtccctggcaggtgatgagccagagcctgccctgctcagccgagggaggccccgccctgtcccaggtaacccaggtgctcaggggctgggtgacctaagccggggataaccccaaatccccatccaaagggtttcactccagaccggctgccggcccactcctgccacagtccccccatcttcgccatacccccgcctctgggcaggatcttccggaaggtgggccagcggctgctcacccagtgccggccaccctgtaagtaccacccccgcccacacctgcccaacacctgcccacgcctcccacctgcccacacctcccacctgcccacgcctcccacctgcccacacctcccacctgcccacgcctcccacctgcccacgcctcccacctgcccacgcctcccacctgcccacgcctcccacctgcccacgccccccacctgcccacgccccccacctgcccacacctcccacctgcccacacctcccacctgcccacacctcccacctgctcacacctcccacctgcccacacctgcctacgcctgctacctgcccccacctgcccacacctcccgcctgcccacacctcccacctgcccacaactgccacctgctccgctctgtctccacatcaggggtgggtgtgggtggcaggtgcccccctacccccagcttggggcccaggctgtgccccctccaaggccttgtgcctccctcaggccccttcacgcctaaagaggcctcgggtccaggagaaggtgggccagaccctgactccatggagtgggacggcgaggtgagacatcggggtgggggacacggggagacacaggtggagggcatgctggcccctgctaaaaccccctcccccatgccggcttctctgaaccccttctggggtctccaagcccggccccctccccctagtcccgtcctgacgcatcagagctgggatccatttgtgtccaaatgtgcccacctgggctttcccaagggccgggctcgaggccatgggaagggtcccatccatggcttcagtccatcacatttattgagcacctactgtatgcctccgagacactccgaggctgcctcccaaggggaaagcagtgcctctgtgtgcagagcacggagggcacaggcaggggccagagcctgccacccacctcacgcctgtccctggggctggggccggggccacccccacccctgctgctcccacctcagagctccctgtctgcgaaagaggttccctgcctggaaggccccatccacctggtcgcacaagggaccctgcagagtgacctggccggtgagcagatccccgtcccagcccggggctgcaggtggggagggaggaattacaagtgacagggggaccaaggccgtggcttaccagggtcacagccgccgtcccggcctcacctttcccgcctgtcaaatgggaatgccgcctctgggttgaggatgagatgttcctggatggagccgtggggagggggactggttggaagagcctggtggtgggaacccagacctgtctgcggcacaaagacctgtcttcccagggcccgaggggagccggcggccagaggtggaggcggccctcagacacctgcagctgtgcctggatgtaggccccccgggtaggagccggcccagcccccaggatcacctttactcttactagccaagtaaaattgccttcattcccatcctgggccctcctgggtatttctgggggtgaggagtaggggtgagggaggccccaggacacggtgacatcaggagagtgggttagccctcctgtgtgcagagcctggcacggagggctctgcggcagccttacgtttcacggtctcttaaattcatgacccgggctcgttagagacccagtgagtgaggaaacgtgacctgggacgttggacacagagccctgtgcccacaggccacactccaaagggggacccctcttatccccagtgtcccagaacccaaaccctcttcctctcccctcctctccctgagcctccactgacccacacatactgccacccttagagagggagccccaaaccccacgccaggtctccagcccagaagccttttcttttccttttctttctttttttttaagagacggaatctcactctgttgcctaggctggagtgcaatggtgccatcttggctcatcacaacctccacctcctgggttcaaagcgattctcctgccttagcctcccgagtagctgagattacaggcgtgtgccaccacacctgctaatttctgtattcttttagtagagacagggtttcaccatgttggccaggctggtctcgaactcctgacctccggtgatctggccgcctcagcctcccaaagtgctgggattacagacgtcgtcagccaccacgcctgggcgcatttttttttttttttttttttttttttttttttg[272 bp omitted]cccagcctcaggaccccatctctacaaaaaaatgagccgggcatggtggtgcatgcatgttgtcccagatactcaggaggctgaggaaggaggatcacttgagctcggaggtggaggctgcagtgagctgagatcgtgccactgcacttcagcctgggcaacagagcgagaccctgtctgaaaagccaacagacaaacaagcaaaaacccagaaacggggcagggcgtggtggctcatgcctgtcatcccagcactttgggaggctgaagcaggtggatcacaaggtcaggagatcgaaaccatcctggccaacatggtgaaaccccatctctactaataacacaaaaattagctgggtgtggtggcacgtgcctgtgatcccagctactcaggaggctgagggaggagaatcgcttgaacccaggaggcggaggttgcagtgagccgagattgcgccactgcactccagcctggggacagagcaagactctgtctcaaaaaaacaaaacaaaacaaaacaaacaaaaacacacacacccagaaatgtgtagtattttcagagcattgcaagtatttgagaattgctcattcccaggggtgcgccagtatcccacagtctccctctgcaagccagaaattagttacggttccgtggcttctgttgatgtctggtctcctagaatccaccaccgaagcccccaagcctctgtccggtccccgccgtgggaagggtctcacccatggtttcagtccatcacatttattgagtgcctactatatgcctgacccctgacccctggctcagcatacctttgtttgtgcccagccacacaggaccccctgggagagcagcagcccatcctctgggcccccaaatgggtggattattccagcaaatacggctttggctaccagctcttggacggggggcgcacgggacggcacccacatggccctgcgaccccccggagggtaagttgtggcctcctgtgccctgggggaccaggcactccccctgccttttttcattcatctctcaagtatttattaagcacctactgtgcacacctacaggtgctccctgcctggtcggggagaacaacactaaacgaatcagcaagtgcgtttctgtagtaaatgaacccagtgaagaggcagattaggaggggaggtgaatctcagtagtgtgggtagggggaaggggaaggggtctctgagaaagtgacgtgaatgacaagcggcagccctgtgctttgggaggccaaggcaggattccttgagcccaggagatcgagatcagcctggacaacatagcaagaccccatccctacaaaaattttaataattagcttggtgtggtggcacacacctataatcctggcacgttggaggctgaggtgcggactcgcttgaacccagcagtttgagatcagccttggcctcatagcaagaccccatctccacaaaaaaattaaaaattagctgggcgtggtggtgcacaccggtaatcctggcactgtgggaggctgaggtgggagaatcacttgagcccagcagtttgagatcagcctgggccacacagcaagacctttctctacaaaattttcttctttttttttttttttttttgagatggagtctcactctgtcacccaggctggagtgcagtggcgcaatctcggctcactgcaagctccacctcccgggttcacaccattctcctgcctcagcctcctaagtagctgggattacaggtgcccgccaccactcctggctaattttgtatttttattagagacggggtttctccatgttggccaggcgggtctcgaactcctgacctcaggtgatccacccgcctcagcctcccaa[224 bp omitted]tcagtaggtcccagctacttggatggctgaggtgggaggatcacttggtcccaggaggtcaaggctccagtgagccatgattgcaccactgcgctccagcctgggtgacagaacgagactctgtctcttttttttgagacggagttgtgctcttgttgcccaggctggagtgcaatctcggctcagcgcaacctccccatcccgggatcggggtagctgggattacaggcacccgccaccacgcctggctaattttgaattttagtagagacggggtttctccatgttggccaggctggtctcgaactcccgacctcaggtgatcctcccacctggacctcccaaagtgctgggattataggtgtgagccaccgcgcccggccttaacacaatctttctagcgggagtgacatgggggccagtggggaggtggctggactcatcaggtgggcagtggcggaggcctgggctgtgctggtgaccggggagggatgagaggggctgcagtgtggatagagttggaaggcaggaagggtggaccagctgtcagctgaggtgaagagaggacagagagccgcactgggcatatggataaggtgtaactagggcagagctgctctttaaagccaccattccagggggtgtaggtcaatggaagggtgtccactggcctgggctgtccaggacagaggccctgtgtcctggccccagccaagtgtgctacatgcccaactgcgggaggctggaagccttcgccctgagggatgtgcccggcctgctgggcgccaagctggccgtgctgcagctctttgccggctgcctgcggcggcggctgcgggaggtgagagctggggtgctgggtgtgggggcgaggggtggggacgccccctgcgtcacgtgacctcagccgagtctgtccacaggaggggaccctccccacacctgtgccacctgctggacccggcctctgcctcctgcgcttcctggcctctgagcacgccctgctgctgctgttcagcaatgggatggtgcaggtgagcccggggctcaaactcggggcactggggctcggcagggtggggtctggcctgcctgggctgttacggagcaagctttgggggagccttaggaagcatttgcctcccaggaaaaaaaaaaaaaaaaaaggtattggctcctgcgtacaaaaccacagcatggaaaatgcatgacgtttttgggccaggcactgtggtccacacctctaatcccagtgctttgggaggccgaggcgggcagatcgcaaggtgaagagtttgagaccaacctgaccaacacggtgaaaccccatctctactaaaaatacaaaaattagctgggcgtggtggagccttcctgtaatcccagctactcaggaggctgaggcaggagaatcgcttgaacctggcaggcggaggttgcagtgagccgagatcacgccacagcactccagcctg[225 bp omitted]tggggaggctgaggcaggagaatggcgtgaacccgggaggcggagcttgcagtgagccgagatcgcgccactgcactccagcctgggtgacagagcaggactctgtttaaaaaaaaaaaaaagtcagggtcttgctggaagactgtgggcaggggagcccccatctgagcctcagtttccccaggtgtacagtggagcacttggcctcccgaccccgagttcctgtggctggggcaggcactaggggccagactgggggctctgggtccagtgtccacttgtccttctggagcgccacggctggaggcaggtgcaggggtacccgtctccccttgactggtatcttaccctttgcaggtgagcttcagtggagtcccggcccaactggtgctgagtggcgagggtgagggtttgcagctcaccctctgggagcaggggtcccctggcacctcctactccctggacgtcccgcggagccacggctgcgcccccaccaccggacagcaccttcaccacgccctccgcatgctgcagagtatctagtgcccctgagggtcagagtggacccctgcatggtagtgccagggacccaggctccatttccattcctgtggctcccccagaggggctgtcctgggggagggctggggggcacacgggaggtgggttcttgccttgtggcatgactgttcaacccagactttgctgggatctcttcctttttcattaaagacaatttgaaatgctgtaggccatggtctgcctctctttgggggaaagcgtttgaggagctttggcaaagaaacgttgaccccacgtgacgttgcatcctccctgtttctcttagtggcagaggtgggttacattttcactaatgcagacattagcaccagaggccagtgtagtggctcatgcctggaatcccagcactttgggaggccaaggcaggaggatcgcttgggcccaggagtttgagaccagcctgggcaacatggcaagaccccatctctacaaaaaattagctgggcatggtggcacgtgcctgtagtcccagctacttgggaggctgagatgggaggatggcgtgagcatgggaggttgaggctgcagtgagctgtgattgcaccactgcactccagcctgggcgacagaacaaagaccctgtctcaacaacaacaaaagtagtaccagaagtggggttctgccataactccaaatctaaaacatgggacagttgcttaatgggtggacaggaaagaagccgacactgaggctggaaagatggctggctatgctccgggacacagttggcacaaccgtcacctgtgctgccctggggtggacggtgcactcatggacctgacctctctgggctgatggagcattggttgttagatcaaaatgtcataaaaggccaggcgtggtggctcacacctgtaatcccagcacttcgggaggccaaggcaggcagatcacttgagctcaggagttcgagaccagcctggccaatatggtgaaactccgtctctactaaaaatacaaaaattagctgggtgtggtggtagggggcctgtagtcccagttactcaggaggctgaggcaggagaatcacttgaacccaggaggcagaggttgcagtgagccgagattgcaccattgcactccagcctgggcaacagagcgaaaatccctctcaaaaaaaaaaaaaaaaaaaaaaactggacgcaacctaagtgtccagcggtgcgagactcaaacatctggccatcccctgggatgagtgaggctgggaaagtgggaaggctcacgggaggcattaaggcaggccgaggggtgcagagctgatgacggaaaaacccgtcaatcgcagaaggactccaggcccctcagtagctcttttgttttttttgagacagagtcttgctctgtcgcccaggctggagtgcagtggtgcgatctcagctcactgcaacctccgcctcacgggttcaatagattcctctgcctcagcctcctgagtagctgggattacaggcatgtgccaccacgtccggctaatttttgtatttttaatagagacagggtttcatttgtttgtttgtttgagacggagtctcactctgtcgcccaggctggagtgcagtggcacgatctcgactcactgcaacctccgcctcccgggttcacgccattctcccgcctcagcctcccgagtagctgggactacaggcgcccgccaccaag[186 bp omitted]ctcctgacctcaggtgatcctcccacctcagcttcccaaagggctgggattacaggcatgagccactgtgcctggccccctcattagcacttgaggccacaattctcagtgcgaggctcctgggctgtgctttgggcgtctgctaaggtgctcagaggtgtatcctatgctggagaaaactccacctcgaccgatgcgggatcaggagaccggggctccagtcccagctggccacttccaggcacatccaggcctcagtttccctgcctgtttaaggggggcatgtattctctggaatccctgccagcagcatgattctgcatgaagttctacttccaagttccggttatcaaccccagaaactcatcataaaagagggagaagtggctcatgcctgtaattccagcaggctgggaaattgaggcaggcggatcacttgaggacaggagtctgagacctgcttgggcaacataggaagactctgtctctactaaaaatttaaaagccaggcctggtggcacatgcccgtggtcccagctactcaggaggcccaggtgggaggattgcttgagcccaggagttcggaggtacagtgagctatgattgcaccacggtactccaccactactctgggtgatagagcaagaccctttctcaaaaaataaaaataaaaaattggctgggtgccgtggctcacgcctgtaatgccaccaatagacagatcacctgaggtcaggagttcgagaccagcctggccaacatggtgaaaccctgtctctactaaaaatacaaaaattagctgggcgtggtggtgagtggctgtaatcccagctacttgggaggctgaggcaagagaatcgcttgaacccaggagagagagtttgcagaaggcgccactgcactccagcctgggcgacaagagtgagacttcgtctaaaaaagaagaaaaaagagagacattcctggaggtgcgcacaaaagggcatcattgacatctggagtgcagtggcatgatctcggctcactgcaagctccgcctcctgggttcacgccattcttctgcctcagcctcccgaatagctgggactacaggcgcacgccaccgtgcccggctaattttttgtattcttaatagagacggggtttc[138 bp omitted]tgtggctcatgcctgtaatgccagcactttgggaggccagcgtgggcggatcacgaggtcaggcgttcaagaccatcctggccaacatggtgaaaccccggctctactaaaaatacaaaaattagccaggcgtggtggtgtatgcctgtaatcccagctactcgggaggctgaggcaggagaatcacttgaaccggggagtcagaggttgcagtgagccaagattacaccactgcactctagcctggcgacagagagacactccgtctcaaacaaaaaaaaaaaaaaaaagaaagaatagtagttgttctcaatggtgggggggggggtgattctgtccccaggggacactgggctatgtctcgggacatctgtggtcataatgacagggagtgctcctggcatggagtgggtgaagggcagggacgccgctcagcaccctgcaatgcccaggacagccccaccccagagaatggcttggccccaacatccatagtgcccaagaggagagaccctagcttggacataggaactgaaatatttacaggcttagtgtttaattcctaaagcggatttcctctgtaatcagggaaaaaaaaaaaaaaaaaaaaaggaatgaagtggagaaacggcactcccgggagacgttgcacattcccaagcccacgctgcacctcacacgcagcggggagcaatgtccccgtagtggcccctcgtcaaggtcagtgatgcacggggcgagagaggggttgaggtggggatggcctcctgccaagcacaacgtgtcctggggccacccatctgcaggcagagcgctccaccactcaaatgggggcgtgatgagtccgaggccacccaggtctgaagcttcccaggggccctcctcacagccctttccctttggaaccatagtctatcaattctgaaagtaaaatgcagacttttcttttttttcttttcttttttttttttttgagacagggtctcactctgtagcccaggctggagtgcagcgatgccatcttgactcactgccccctgtgcctcccgggttcaagcgattctcctgactcagcctcccaagtagctgggattacaggcatgcgccaccacacccggctaacttttgtatttttagtagagatgaggtttcac[215 bp omitted]gctctgcctccggggttcaagcaactctcctgcctcagcctcctgaatagctgggactacaggcatgtgccaccatgcccagataatttttgcattttcagtagagacgggatttcaccatgttggccaggctggccttgaactcctgacctcgggcaatctgcccacctcaggctcccaaagtgctgggataacaggcatgagccaccgcgcctggcccatttcttttatttttatttatttatttttttttttgagatggagtctcactctctcgcccaggccggagtgcagtggccggatctcagctcactgcagcctccgcctcctgggttcaagcaattctcctgcctcggcctcctgagtagctgggactacaggcgtgtgccaccacacttggctaatttttgtatttttagtagagacggggttttaccatgttgcccaggctggtcttgaactcctgacctgaggcaatccacccgcctaggcctcccaaaatgctgggattacaggcgggagccactgcgcttggtctggatgccgtttctttgtcacaaaattgcaaccttaacaaatcaaactcaagtcccagggtccaccaccacctgtccctgggccccctctgtttctgggaagtgacagggtctcctctttttttcccatctgtttcctatgcttactttcctggagagaataactgacccatggcggcatccccgcgtcgcctctcggccgtgtgcctgtgtgtgttgctgcgtctgtggagatagagccaactctgtgctttttatggaacgggggatgaagcaaagccagcgtttgtggatgggagagaaaatacgaccaaaacagacactggggcccatgttgggagtagagagggctgcaggcacgctgggctggggtggggggaggaagcagggggacgggtcaggggaggtcgtgtgccttggtgtggccagacctaggaggagggatcagtggggagaatttggagatgcccccagggaccccaaaggaatggagtgtgggtgagagaggaacaaaagcaagcagagaaaacacagagcaagtgcatcactgcctttaaaaacaaaatgagccggccgggcgtggtggctcacgcctgcattcccagcactttgggaggctg[134 bp omitted]gaggcaggagaatggcgtgaacccgggaggtggagcttgcagtgattgagtgattggagatcacgccattgcactccagcctgggcgacagagcgagtctccatctcaaaaaaaaaaaaaaaaaaagtttgttgttattgcaagacaccaagttgttgttgttgttcttcttcttcttctccttcttctctttcttcttcttcttttttttttttttgagacagtttctctctgtcgcccaggctggagtacagtggtgcaatctcagctgactgcaacctctgcctcccgggtgcaagcgattctcc[134 bp omitted]ctgcccctcaaagcgctgggattacaggtgtgagccaccgcgctcggcctcttctctttttttatagagagaaggagtgtcgctccgtcacctaggctggactcaaactcctggtctcaagcaactcccccgtctcagcctcccaaagcactgggattactgtgagccaccgtacctggcccagacaccaaatgtgaaggtaacttgtgacccggcaatagctaactaatacacaacccaaaacatgcaagaaacagcttcatttctgcccggaacatttgtttccagggagaaaaagacaaaacatcttcagagtgtttaactgggtgtcttgcaaaatgacctacctagagtatttatttccatctgcttgtgggcgtcaagaacagcaacaatctgtgccgtctcccacgccccgagcccacaatggtggtttattaaaaataaaccaaccacagaatatattaattttctaacctcccgggccaattcttatttctaggtataagaacttccagagatggcaaagcacccacaccgccctcgtgctaaagtttctggaatcttccttagacgggtgaactgtgtgctgccagaaataaaattaatagcctcacttttttgggtgcttacaagggttggaacttcaagaaatggtcatgaattcactccagccctggctcaaagatttttttttctttcttcccttcttcttccttcttctccctactcccttctcttcctctttctcctcctccttccttctccttctttttctttttggaaaccactgatttaaccctgagagagggaaaacttgtcctggcaagaatttccaaagctcagttttattttttaagacaaagtctcgctcttgtcactcaggctggagtgcagtggcgtgctctcggctcactgcagcttccgactccctggttcaggagatttttctcgtgcctcaggatcccaagtagctggtactacaggcgtcatcatgcccggataaattttctacttttagtagaga[132 bp omitted]ttttcccacgctgaggctacagctgaacccagcctccagaccacctcctcattggtctatgggagcacgtgacatcatgcgtcctccaatcaccagcaagcaagcaaggcgtgggcgggaccaagggcggctacctctggggccagcaggattggctgttgcccgtggtaactgtgtgtgacgtcataaagcttccttgcaccttggcaaggccccgggagcagggaccttttctctcccactatacagatggggacactgaggcgctggttctcaatctatgaaaaaatggggtgctggtaggtaggtcaacctgggtcccacggggagttttcaaactcctgatgactccagagaattacgctgagtgaaaaaagcctgtcccggccgggcgcggtggcccacgcctgtaatccccgcacttaaggaggtcgaggcagccgggtcacaaggtcaagagatcgagaccagcctggccaacatggtgaaaccccatctctactaaaaatacaaaaattagccgggcgtggtggcgggcgcctgtagtcccagctactcggggagctgagggaggagaatcactttcaccacggaggcggaggttgcagtgagcctagatcacgccactgcactccagcctgggtgacagagtgagactccgtctcgggaaaaaaaaaaaaaaaaaaaaattagccgggcatagtggggtgtgcctgtggtcccagctactcagttggctgaggtgggaggatcacctgagcccaggagttccagaccaccctggggaacatagtgagacccca[170 bp omitted]gtggcgggtgcctgtcgtcccagctactcgggaggctgaggcaggagaatggcgtgaacccggggagacggagcttgcagtgagccgagatggcgccaccgcaccccagcctgggcgacagagcaagactacgtctcaaaataaataaataaataaataaataaataagccaaggatgatgatgcacacctgtagtcctagctgcttgggcgactgaggcaggaggatgccttgaacccaggagttcatgtaggttgcagtgagctgtagttgcaccactggagtccagcctgggcaacagagcaagaccctgtgtaaagaacaaaaaaagtttatgtaacattttagaaatggaattagggttagggatgagggtgcggggagggtgcacaaacagcaagagatcctgatggtgatggaaatgctccatgtcatgatggtggatacacgaatctacccaggccagcaaattataggagactaaagacatctcacacactcacacacacgatcacaagttaaactgaggaatcctgagtaagattgatggattgtatccatgtgaaatcttacttatatgttttttagagatggagtgtccttaatgcaccccaggctggagtgcaattttgtgatctcagctcactgcagcctctggggttcaagcgattctcctgcctcagcctccggagtagctgggattacaggcgcccaccaccacgcccgactaatttttgtatttttagtagagatggggttccactatgttggccaggctgctgtcgaactcctgacctcgtgattcacctgccttggactctcaaagtgctgtgattacaggcgtgagccaccacacccgtttttgttttgttttgttttgttttgtttttgttttgagatggagtctcactctgttgcccaggcgagagtgcagtggtgtgttctaggctcagtgcaaccaccgcctcccaggttcaaacgagtctcctgcctcagcctcccgagtagctgggactacaggtgcccgccaccacgcccggctaattttttgttgttgttgtatttttggtaaagaggaggttccccatgttggccagcctggtctcgcactcctgacctcaggtgatccacctgccttggcctcccaaaatgctgggattacaggcatgagccacagcactcggcccttccctcctttctttctgagacagggtcttgttccgtcacccagactggagtgcagtagcaggatcacagctcaatgcaacctagaagaattcctgtcgtcctgtgctcatgagatcctccctcctcttgcaactgcatatgaattgacaattatttcaataaaattttcaattaaaaaattatgagggctgggtgcggtggctcactcctgtaaccccagcactttgggaggccgaggcgggcgaatcacgaggtcaggagttcgagaccatcctggctaacacggtgaaaccctgtctctactaaaaatacaaaaactagccgggcgtggtggcgggcgcctgtagtcccagctactcgggaggctgaggcaggagaatggcgtgaacctgggaggcggagcttgcagtgagccgatatcacgccactgcactccagcctgggtgacaga[225 bp omitted]gaggcaggagaatcgcttgaacccgtgaggcagaggttgcactgagctgagatcgcaccactgcactctagcctaggtgacagagcaagcctctgtctcaaaaaataaaaagagaaaaaaagaaaaaagccaagaaagtggagtcttttctgcccttgaaagggtagtggtaaaactctctgggtggtgtggggtgtccaggtatctctctgtcgcccctaacactgggcgagactggatctgttttgcataaaggaagaacacatttctgtgtcccctgccagtcatccatgcaatcatcaatttcgttgttgttgttgttgtttgagatggaccttccctcttgtcgcccaggctggagtgtagtagcatgatctcggcccactgcaaccttcacctcccgggttcaagcgagtctcctacctc[212 bp omitted]gcgtactagcgctgaactactgggcgagggtcggccagcggcaggaaaacggggaaacaggtgcgcccgtttgtgcgcgggggaagctcgcagccacgagcgaagggacctgtgtctccactttggacaaatctcccgggaatttcccgggggttcagagctccgatgtcggggcggggaggggcagggtgtcatgtgcggcgctggccacacggtggcgacagagaacgtgccgttctggtccagcctggcggctgtggggtcgaaatggggaaggagttggggtcgcgatggagtcggggaggcagtggggtaggagcgagggcccccttttttttggagacagagtttctcgttgctcaggctggagtgcaatggcgtgatctcagctcacctcaacctcctgggttcaagcgactctcctgcctcagcctccagagtagctaggattacagacatgcaccaccacatccggctaatttttgtatttttagtagagacggcttcgccatgttaggcaggtctcgaacttaggacttcatgtgatccatctacctcggcctcccaaagcgctgggatgacaggcgtgagccaccacgcccagccgagacagcctacccactgtgggctttggcaataaggcgctcaatcaattataataaacacctatggaattaattcccgtctgtgttccccaaaccgtcctccccaacccccaccgccgcccagtaattcagggaccacaagaatggaggtctctggcttataactctcactgagaagcctgatgcaggagctcacacctgtaatcccggcacttcagtaggccaaggcaggaggatactactgagcctcggtaatgtattgttttttattttttttattttatcatatatatatttattatactctaagttctagggtacatgtgcattctcagcaaactattttttcttttatttttatttatttatctttttatttttgagacggagtctctctctgccgcccaggctggagtgcagtggcgcgatctcggctcactgcaagctccgcctcccgggttcacgccattctcctgcctcagcctcccgagtagctgggactacaggcgcccgccaccacgcccagctaattttttgttttagtagagatggggtttcaccgtctcgaactcctggcctcattgatcctcccacctcggcctctgaaagtgctgggattctaggcgggagccaccgcgccccgccaaggctgggtaatttataaacaaaggaggttcctggactcacagttctgcatggctggggaggcctcagcaaacttacaatcacggtgcagggggaaacaagcgtgtcttacctgactcaggcgaaaagagaggaaggaagagcagggaaaactgccttataaaaccatcagatctcgtgagatctcactcactatcagagagcagcacgagggaaccgcccccatgatccaatcacctcccacctgctccctctctccacacgtggggaccatggagattacaaccgagatgagatttgggtggggacccagagccaaacctcctcaggacctctgtcccccctcctctcctcccactgcctctgggcacgctggcacccctgcctcctcttccctggttggtctttggtgagatgtgtgtccattggtcccagaacctggcgttgcccaggctggagtgcagtggggcgatctcggctcactgcaagctccgcctccccggttcatgccagtctcctgactcagcctcccgagtagctgggactacaggcgcccgccaccacgcccggctaattttttgaattttttagtagagacggggtttcgcc[138 bp omitted]ctcacacctataatcacagcattttgggaggccaaggcaagtggatcgtttgagctcaggagttggagaccagtctgggaaacatggtgagacctcgtctctattaaaaacacaaaaaattagccaggcacagtggcacatgcctgtaattccagctactcaggaggctgaagcaggagaatcgctggaacccaagaggtggaggttgcagtgagctgagactgtgccactgcactccagcctgggtgacagagcaagactctgtctcaagaaaaaaaaaaaaaaaaaaaaaaaaaaggccagtctcagtggctcacgcctgtgatcccagcactttgggaggctgaggtgggtggatcacctgaggtcaggagttcgaaactagcctggccaacatggtaaaaccccgtctctactaaaaatacaaaaactagccgggcgtggtggcaggtgcctgtaatcccagctactcaggaggctgaggcaggagaatcgctttagccccgggaggtggaggttgcagtgagccgtgatcaagccagtgcactccaacctgggtgacagagcaataacctgtctcaaataaataaataaataaataaataaataaaattcaagcttagtagaataaaaaattcagcttcccagttgtcctcgcatttcaggtgacaaatcatgcacagctggtggctttgtatcacacagtgcagatttagaccattcccataatcgttttcatcattgtagaaagttctattgaacaacgctgggctagaacattctagaagattctagaaagctccaacacaggagccagcagccacctgagggtaattacatttaaatttagacttaaattctgttggctggtgaagtccagcacatgctggtttggtttttttttttttaggggtgaggtagttagactgcagcaaaaacaggggctcccatcacagttctgtgcagggggtgagtgagactgaagaaaccaaagaccatatcccaattcactttctgaaatcatctcccgttattttcacctgttctctgattactctttgttccctgcgtgtgccctgtcatcccacctccacacctttgccatactgtctccctttgacccccacatccaaccagccctgtctagccttctgcagcatccccaagcagaattcactgggcagaattaatctctctctcctctgaactcctgattcacccatccatccacccatcccccttcctgtccacccatccacccatccatccatccaagcatccacccacccatccacccatccaaccatccacccactcatccacccacccactcatccacctgttcacccatccacccatccattcatccatccaacgatccacccacccatccatccacgcatccatccatccgtccatccatccaaccatccaagcatccacccacccatccatccatctccaaccatgcacccactcatcccttcatccatccatccatccatccatccatccatttacccaccctcccatccatccactcacccatgcacttgtccacccatccacccatccatccacccacccatccattcacctactcacccatgcacttgtccacccatccacccatccatccacccacccatccattcacctacccacccatccatccatccattcgtccacccactcccccatccccccatccaaccacccattcctccatccatcaattcacccacccacccactcacccatccatccatccatccatccatccatccatccatccatccattcatccactcatccactcatccatttacccaccctcccatccatctacccccccatccacccatccatccatccacccatccatccatccatccatccatccatccatccacccaccctcccatccatccacccacccatctacttgtccactcatccacccatccatccacccacccatccattcacccacccacccatccatccatttaaccacccacccacccacccacccagcaacacatccatccacctacccatctaatcatccatccatccatccatccacccacccacccatccatccatccattcgtctacccacccacacctatcccccatccaaccacccattcatccatccaattcacccacccatccactcacccatccacccacccatctactcatccatccgtccatccatccatccatctactcatccaccatccaccacccacccacccacccacccattcaacatccatccatccatccatccattcactcacctgcccatccacccacccatccatcccctccagaatgtaagcatctgacgtcagtgattgcgagggcgcctatagtgggccagctcttactgagcacttgccctgtaccaggctctgttgctcaccagctggtggtttacccttggttaagcccccaattccccatcctacggatgcagaaaccaaggttgagaaggcgaagtgacacgcccagggacagcccaggaaggtggcgcggcagacaggggctcaggcatctgactctagagcccaccattttcctcatgcatggtggacatggggcacggtctctaccctggggacatcccaagggacacacggtgtgtggatggtgcgttcttcccaccaagggacacaaaatgtgtgggtggtgtatccttcccacgtggagcctacagatgggagaaccacagccctgcccctcagtgtcccccgtgtctgatgagacctggaacaggggattttcagcagacattggactagggtcaccccaccatgccaagtccatgagtcaaaggaggtgaatgacaatagcaatgagactttgtgcccaggacacaggccaggcctcagcccttggcttccctgagctgtgccgagacatggagaggccaatgcatgggatccttgctttgccattgctgcccagcccctctagaaaattcttccagctccttggtcagaaatgtggtccctgtaggtggttagagtttcagttgttccaactgctattagctctgatgatggaaaggttggcatggaaaagttggctttcaggcacagctggatccagggcctcgtgcagcaactttaagaatccagactggaccggatgcagtgtctcatgcctgtaaccccagcactgtgggaggctggggcgggcggatcacttgaggccaggaattcgagacctgcttgggcaacatgaagaatccccgtctctacaaaatatacaaaaatttaaaaatatacaaaaaattagctaggcatgatggtatgtgcctgtggtcccaactactagggaggctgaggtgggaagatcgttgcagtccaggaggtcaaggctgctgtgagttatgattgcaccaccacactccagacagggcaacagagcaagaccttgtctcttaaaaaaacaaaaacagaatccatctctggccatctcttgtgctgtgcccaaaggccacagacacttcagactctcatgtgccagctgagcaaccctgcagtgggagtgagctcatccctcggatgtctccggaagtcctgggaccagcatggtgacacccctggcccctggctggggggcctcagctcctctatatcactacatcagaaacgcctagagcaggtcctggccagtctagacttgggccctgccctggcgggtcacccagcagcctccccaagctttgccattcccttccgccgggcaattccccaccccacctcccagggtctttgcgcctagctctgtcatgtcctctcttctcccaatttttttttttttttcgtcgttgttgttgacagagtcttgctctgtcacacaggctggagtgcagtggtgtaatctcggctcactgcagcctcaacctcactttgctcaagtgatccttccacctcagcctcccgagcagctgagactacaggtgtgtgccaccacgtccagcttcctcccagtgtggaggtgcctctcctctccccagcctcccctgcagttaggtgacaaactgaccccacttggggctccccggaagcagagctgctccatgacaccccctgaatccttgcagcaccagacaaaatcatccccttctgcccactctatcggaacccgggggctgcaggaaccctcatatccttccaaaagactctcctccacccctttgacatttgtcccatctttgatccctcgaccccttgggggctgctctcattctctccatgacccaattgcagagaggggaggggggcatccgcacacccgcccctccctgcggccttctgcagtctggctgaggcacgaagtcagcccaggtcacagggtgtgtggcctgcagccgaacccagccgctccgcacagctgtggccagacccaggttaacagtccctcccggctgggcgtggtggctcacacctgtaatcccagcactttgggaggccaaggcaggtggatcacgaagccaagagattgagatcatcctggacaacttggtgaaaccccatctctactaaaaacacaaaaattagccgggtgtggtggtgggcacctgtaatcccagctactcaggaggctgaggcaggagaatctctggaacctggcaggtggaggttgcagtgagtcgagatcacgcccggctaattttttgtatttttggtagagacggggtttcaccgtgttagccacgatggtctatgatctcctgacctcgtgatccacccaccttggcctcccaaagtgctaggattacaggcgtgaaccac[184 bp omitted]gcggcaggcacctataggcccagctactcgggaggctgagg[132 bp omitted]acaaaaaacactcattattagatttaaggcttgctctaattcaggatgatttcatcttgagatccttaattatatctgcaaagaccttttcccaaataaaatcacattctcactttctgggggactccttattttggtggggggactccattcaaccaatgacacgcccctcagtctcaccgagagggagtttgggcctcgaacaccctgcgttttgcggaggagggagttccaggccaggggcctgggtagggctgggcttgaactcaggtgtgcgtctctggtggttcctctctcctcctcgcctcctcctggaagctctccaggcctctcttccacacgtgcttctctttccctggtgggttctaagtcccaggcccctccccaaggtccactccccaagcctgcagcctgtgtgcccggccccttccttgtccccggagtggcccatcctgacacccaggggcttcctggctgttttgggatggcgcgctgggacagctcaccatgggtccagcctgtggtctttttttttttttcttttttttttttttttgagacggagtctcactctgtcacccaggctggagtgcagtggtgcaatctcggctcactacaagctccgtctcccgggttcacgccattctcctgcctcagcctcccaagtagctgggaccacaggcgcccaccacca[176 bp omitted]ctatatctggtggccccatgtgtctgtcatggctcccagagcagtggggggatgaccacggctcaaacgtccttcacagaccaggatgcatcggggtcaaacctgggacgggcatttccaggcctcagtttccccatctgcacgaccgctggacggtctgttgggatggatcccacacacccagagagctgggcagatgtccctgaggaaggacagcctgggtcccctttctctgtgggatccatggttgaacacccacagggatggggaggacctgaggtttgctcacggggagcccagctagaccctcccccacagacccaattccttcgtctggaacaagggacagtgcctggtcggggtgagggcctggaccacggaactggggggttgaggggctggatccgggtgtcccctgccccggggtctcccctcctggtgcccatcccccacaccacgctgaagccgtgtgctcacatgtagaaaagaggctttattaagaaggctttgaagtcaaaaaataaaactcttgatacaatttttttaacccttaaatcagctcagcaaatatataatcagtaatttagctgtgtaagattaaaggtccattactttatttaaaataaaatatattttagttcttaaaatttattccataaagtacatatttccctataaattccctacatatacacaagaggtaaaaagtaaaagtaaaaaaaaaaaaaaattaaaaaaattttaaaaatgacaacagaaaccgcagtaaaaaggggattaataattaacagaaagttagaaatttgattggaacgcccctcgcccccgcccccctgccccctccggccgcgcacggttgatgtacaaaagcataaatggttagccccaaaaagggagtaaaaatgtcaccctcctcctctggaacgtctgtgcggcctgagaccggccggcgagaaaagtcaaatcagaaaacggcttcggacgaaaggaaaaaacgctgagcgctggaaaagtcgtgttttttgttttgcttttttaaagatcaccctggaggggaggggtgtctaaaaataagaaaactaaaaaaagtgcaagcggaccttttctctccggtttattgtaacctgaccactcaatactgtcgttgaagggctgaggcgccgccgggctgcggggtctccgtctccacgcctgaggcggcagttaaagctcatctgtaaacactggccgccgcccacccccctgccccctcggcctccgcccctcgccccctccccgtccctctcccaccccgggtcccgccccgtctcccgcgcccacccctggcccccgcagatggccccggccacgtggtggtccgcgctctaggaaaagatatgaatggcctgggtggccggcgtgcggcaggcgggacactcgggctcgctcttgccgcagatgcggacggcgcagtccatgcagaagaggttgtggccgcaggggaccagcgcagccatcacctcgccctcggcgcacaccacgcactctcgcgccagggccggggccgaggacgccgaagggggcttgcggctgttctcggaggcgccggagtccaggggggcgcaggcggcggccgcggggctgctgggcagcgaggtggccgtggagaaggcggcgccgcctgggaaggatacggggccctgcgggggtcgccaggacagcgcgcccaccgggtccggggcgccacggcgagacagcgggagctccaggcggaggccgccgggctcgggcagcgtgggcgagtggcggggggtcccggccccactgctgcgccgggcgccggcggcgggaggtcccggggctccgttgaccgtggagcagccgctgaaggcgggcaagggggcggcgcgctcaaaaggcgcccagatggtggccgcggcgggcacggtcaggtccagcgccaggaagtcgaagtcgaagccgaagtcgcagtcgtcgggggcggccgtccccaccggggcaccgggaccctccgcgccgaaggcgaagcccccgttgccggagccgctgtaggggctggcggggcctgggtccggcacggaggggccgccgcggctgcccgcgtagaaggcctcgggggcgctgggggcgcccagggccgtgtccccgcggaggccggccgtggccgtggggggccgtcgtccctggttgggggtcttggcccagaggctggcggccgccccgagcaggtccaggcagacgtcggtgccgttggcgtggaagtcgctgtcggggcccgcgtcggtgaaggcgccagtgcgcagcgtgatgtgcgcctcgatctcctcgcgcgcgcggtccacgttctcgggcatcccagtgaccgcgaacaccggctccttgtcgcgcccgggcgtcacgatgtaggtgtgcgtccgctgctggatgcgcttgatggtggcgcccttgggccccaccaccagccccaccacccggtagggcacgcgcacctggatggtggtctgtccgggaaggttgggcgggccctgggcggcgccgggcagacccccggccttgctgcgcgtggcgcggatgatggagaagtgttcggccgccgacaggatctcacgcttggccatctccacgtcctccttccggccggtcacgatgaagaccggctcctcgccccgcactggggtcttgatgtaggtgtttgtcttggcccgcagggccttgatcttgcagcctgtccgggagggaggggaaggacaaggtgacccagagccccctgcgcagctcagccccgctgggcatgcaggctgcagggccagtgagggagcccctacctcccagcctgtgcccaacaacactttatcctcagacacgccacgtcccttcttccctcagcctcagtttcccctctgggctcgagtttggcctaaaagcaagacggcaaggggaccctgttttaggttgaaaggtgtgcgccataatttatgttcccctggaaccgcagtgtgacggctggggtgtgaatgtttcccccaagttcacaagctggaccctaatatgcggcgttgacagtattaatttaatacgtagggtcggctgggcccgtggctcacccatgtaatcccagcactttgggaggccgaggcaggtggatcacttgaggtcaggagttccaaaccagcctggccaacatggtgaaaccctgtctctactaaaaatacaagcaatcatccgggtgtagcggcaggcacctgtagtcccaggtacttgggaggctgaggcaggagaatcacttgaacccaggagacgaaggttgcagtgagccaagattgcaccactgcaccccagcctggacgacaaagcaagactccaactaaaaaaaaaaaaaaagcggggtgcagtggctcacccctgtaatcccagcactttgggaggccaagttgggtggatcacgaggtcaggggctcaagaccagcctggccaacatggtgaaaccctgtctctactaaaatacaaaaaattagccaggcgtggtggcaggcatctgtagtcccaggtactcgggaggctgaggcggaagaatcgcttgaacctgggaggcagagactgcag[132 bp omitted]tcccagccactggggagggctgaggcagaaccgcctgaactcaggaggtggagggtgcagtgagccaacatcatgccactgcactccagcctagccacagaccaagactccatttcaaaaaaaaaaaaaaaaaaagagccacagtggcagggtcagtggctcacacccgtaatcctagtacttcgggaatctgaggcaggaggatcactggagcccaggagtttgagaccagcctgggcaacacagcaggaccccatctctactacaaacaacaacaaaaaattagccaggtgtggtggtacacacctgtagtcttagctactcaggaggctgaagtgggaggatcacctgagcccgggaggtggaggctgcagtgagctatgatcacaccactgcacttcagcctgggtgacagagcaaagccttgtctcaaaaaaagaaggaaaaaaaaaaaaaagacacacacacacagagaagctggccttgtggagacacagacagagactgcagtgatgtctctacaagccaaggactggccatagcccccggaaactgaaggcgccccccgccctgcccacaccttgacttggaacttttatcttacagaaatgagagaggagacgtttccatggtttcaagcccccattgtgtcagcccagagagcaactggagaccctctgacaccacctcccggcccaacaggaggggaagccgaaattcagattgtggaaactgcctacaattttcttccggccaaatgaccctccctaggctaccaagaccctggcctaaggggagccgaggtctcggcccgactgcagacgcccgcaccctgactccagatgcctccgaggcatccaggtgggccctgaggggcctgctgtggctttgttcttgttggctgggctgggggtctgacctggtgagggacatgagtgtcagtgtgggaggcagggctctcctcaccgattgtgtaggcaaccgctgaccaggtatggccttcttggggtcccagacatccctaccccacccctggggccttaatggtttttttttttttcttttccttttttgagattatctcactcttgttacccaggctggagtgcagtggtgtgatcatagctcactgcagccttcaactcctgggctcaagtgatcctcccacctcagcctccagagctggcaccaccatgcccagcttaattagttattgagacggagttttgctcttgttgcccaggctggagtgcagtggtaccatctcggctcactgcaacctctgcctcctaggttcaaacaattctcctgcctcagcttcctgagtagctgggattacaggcgcccaccaccacacccagctaattttttttatttttagtacagatgggattgcaccat[138 bp omitted]ccaggctggtttcaaattcttgggctcaagcagtcctcctgcctcggcctcccaaagtgctgggatgacaggtgtgggccactgcgcccggcccgtgaaggagttttgagccactgctcacaacccctcaggctctggggaagcagagggagctgcagggatgtttcaatacagtcagaaggtggctctgaggggaaaacagtgttgctaactctcccacagtgcaagagatgaaatgagcaggatcagcacttttgacggggaagaagtcagaaactgcctgggccaggaagatggaaggcgtgggacctggaggctggtggtcccaggggctcggtagggaggaccctgggaggggtggcgggggtgcacccactcggaggaggacagcagttttcccgccccagctgcactgccaccacacctgtccctcccagtcgcagcattctgttcacctccattgcacccagtcccctccattcttctgtacagtccggtgtccccctcctccaggaagcccaccctgactgcatcgggttgggcctgctcttctgagtctctcctaacatgcctgactctctgagctgcctccctgaggctggaggatggggctggggattccctcggcacttgggggaccttgctatgcctgtttcttcactgtgaaaggggaaggtaacaggcctggcttcacaggcccggcttcacaggccctcagagggccatgaccaggccgttggctcctggcagccaccctggcaggtctcactgcagcccacagtgtttgctttagatagatcctccttgaggaagggaaactgaggcacagggagtggagacccagcaaggctggggaaggaggtgccacccacagatggaggctccgctggccctgcccacaggcaggaagtgagcctgttccccatcacgccgacccggcagagggcagagcccgccagcgttgccagggtgcagcatggggtcctcccttgctgatctgggagccgccccgggtccccagagggtcacacgtgggagaggctgccccgacgtggccaccgctgagctcacaggctgtggtcacagaaagtctggtctgggtgagatgacaaatttgggagatggaggtggcaaggaagggggcgtgtgactgtctgagcagaaaccaggatggtgctgggagccacgcgtgcgtcggggcaggggagggaactggcgcctccccctccccttactccatcctgccctaacccagacggtggcgctgggtggagacctcacagctagaaggcctctaggacctcaaagacggagctggagctcaattcattggtgctgcgtctgctttgacacgtgctggcccccaaaactccacccacatcaagacgccaaggggccaaggaatcggggctccaggagtgatcccagcccacccctgccccactggaaatgacacagcgaggctagagggacaggaagcctgaagggcgggctctgggggacaccgaaggttggcaggcactgaaatgcagattcgtgggccatgtccccagaattccaactcggagggcttgagatgcctgggaatcggggtgaccaccccagagtctggccctgacctgtcccacacccccaacccacagcagccaagtctccccctaccagggccccacgcagcacacacaccagcgggcatcactcatccagcccgtccagggtcctggctgcaatgaccgtgcactacgacttaccaatgaaaccacaagtcctggtgtgggagccgaggccaccagcccaggctggatgggtttgccatggcaggaaggggaatgtgaaccccagggagccgctgaggcaacagcaaggacaggattctagaagcaggacggggcgagaacaaggcctcacagccaacactcagtccaacacgcagccgcccccagccaggcagccgggtgacgcgggacagcagcatcccagacctgggccactatggaagccagcgggagctgaggggtctggtggggaggagggaagctggttcagctgtcaaacagggatgtcaaaaccccctcccaggccaggaacagtggctcacacccgtacgtagttccggcactttgggaggccaaggcaggaggatcacttgaggccaggagttcgagaccagcctgggcaacatagcaagatcctgtctctataaagggtgtcacctgtcgcccaggctggagtgcagtcacagctcactgcagccttgacctcctgggctcaagccatcctctcacctcagcctcccgagtagctgggactacagttatgcaccaccacccccggctaattgtttaaagcttttctgcagagacagggtcttattatgttgcccaggctggtctggaactcttgggctcaggtgatcctcccatctcagcctcccaaagtgctaggattacaggtgtgagccaccatatccggcctctacaaaaaatttttaaaaattagccaggtgtggccgggcacggtggctcacacctgtaatcccagcactttgggaggcc[134 bp omitted]gaggcagaagaatggcgtgaacctgggagatggaggttgcagtgagctgagatcgcgccactgcactctagcctgggcgacagagtgagactccgtctcaaaaaaaaaaaaaaattagccaggtgtggaccgggcacagtggatcacgaggtcaggagttcgagaccagactgaccaacatggtgaaaccccatctccactaaaaatacaaaaattagccgggcgtggtgg[131 bp omitted]caaaagaaaagaaaagaaaagaaaattagctgggtgtgttggtgcgcacctgtggtcccagctacttgggaggcagaggtgggaggatcgtctgagcccaggaggttgaggctgcagtgagctacaatcacaccactgcactcaggacagagcaacagaaccagaccctgtctcaaaaacaacaaaacaaaacaacaacaacaagaaaccgctaggcgtggtgactcacacctgtaatcccagcactttgggaggtggaggcaggcggatgacctgaggtcaggagttcgagaccggcctggccaacatggcgaaaccccgtctctactaaaaatacaaaaatgagcctggcgtggtggtggcagatacctgtaatcccagctactcgggaggctgaggtgaaagaactgcttgaacctgggaggtggaggctgcagtgagccgagactgagccactgtactccagcctgggcgacaagagcaagaccctgtctcaaaatgaaaagaaaaaaacctctcggggaatgaagggaacatgtacactgtactaacgccagaactctcagttgggtctgcagtgtggaggtttcctagcagagcctttcttcctagggctctgcagtgtatggacaggaaaaccatggcatggtccccaccaacaccccagcactgtccccagctgtcgggaaaacctggggcctgcggggatgggaggagaagaggagcctctggggctgcagccaggaacaagggacaggaggggagacagtgagccaggggtcgcccccagctgaggggaacaacctaaaatcactagccttagcctgtgccgacagcagagagagcgagccctgagcagcttccagtccaggccctgccttcaacatcactcactcattcattcattcattagccacagaacaccttctgtgtacaggccctggcaagacactgaagacccaaccatgaccaagcacctgccctggttcctgtccctgggaacatgcagggggagaggctgccacggagcacagattcacccagggtgcctggcaagcggggtgagaaaggagggtacatgttggggtctcagcaggagcagggccggaggtcccctagagcacctttgctggccggctggagggagacgcctgtgcttttgggtctccactttgcctgtctcccagacagggctgcctcccctcacccccagccctcaagctttggaatctgaaattttctttgctgacccaccagagaaactgggtttgaatcccagcccatgatttttgttttgttttggagacagggtcttgctttgttgcctagactggagagcggtgacaagatcatagctcactgcagcctcgaccgcccaggctcaagtaatcctcctgcctcagcctccagagtagctggggctgcaggagtgtgccaccatgcctaatttttgtatttttttttttgtagagacagggtttcgccatgttggccgggctggtctcgattcctaggctcgagggatcctcctgcctcagcctctctgagtgctgctatcccctcagtttttacctattctttacctcttgcagcctctgcctccccatctgtgacctgggagctgcaggacctttcctggggcacattatgggcctcagtgagatggggcaggtcaagtctggcataggcttagcacacagtagaccctcaataaagatctagccaatggccaggcgcagtggctcacacctgtagtcccagcactctgggaggctgaggtgggtggatcacctgaggtcaggagtgtgagaccagcctggccaacatggcgaaaccccgtctctactgaaaatacaaaaaccagctgggcatagtggcacgtgcctgtaatcccacatactaggggggctgaggcaggaggatcgcttgaacctgggaggtggagcttgcagtgaaccgggatcgtgccattgcactccagcctgggcaacagagcgagactccatcccaaaaaaaaaaaaaaaaaaagatatagcaaatgaatgaactggagcctccagcagatgggtgggaactcagagggtttgaatgaccacagtctgcccagaaagcactcggaccccctctaggatcaagagaactgaagctcagagaacagcacgtagctactggggagagggctggtgccaggcctgtgtgactcttgtctaggtggggaggccggacaggtgcacccttcctggcctccagggaaggggtaaccttggagcttgggtttgacagagaagcatgagaagttcagagagccccagggtggagaggaaggtgagtaaaggggcagggccggggcacaaaggacattgaaaggtatgcttgagaacggggtgggtgggagaagctgggagccacagatggttctacagtgtggaagaagtacagactaccgaagctgtggaagacgtaaggactactgaagctgccaacctgtcctggcatccacagttgcatccctggcaacgcgcactccacttatggggtggccactgtgtgtgacctggagctgggattaaaaccagcaacttgggtccaggcatagtggctcacacctgtaggaaccccagcactttgggtggctgaggatcgcttgaggccaggagttcaagaccagcctgagcaacagagcaagaccctgtctctacaagaaaaactttataataaaaacaaataaataaaactggccgtgcgcagtggctcacgcctgtaatctcagcactttgggaggtgg[134 bp omitted]gaggcaggagaactgcttgaaaccagaaggcggagtttgcagtgagcccagatcacgtcactgcactccagcctgggcgacagagcgaaactccgtctcataaataaataaataaaaccagcatcttgccccagaatcctctaccctaatggaggtgagacgtccgcacatcacagagaggggccgtcatctgcgcagggccacggcggcctgcaggacaagcaatcagggcccactctacccccgacccccactgtaccccagggcctgccttgctgacggccaccagcaagagcccagtaagtgggtgcagaacgcacaggccagaggtgggggctgagcctggtgcccacagactccatttcccatggacctgcccctagagaattcccaccctgaggccacaggtctagaagctctcagcctgacgctgattcctgccagctccccatgtggccatagcctcgctcaaaggcccttgggtgccaggacaagcgcgttcacaaagaacacagccacagcctccaccacctggaggctcaggctcgtgcctttggtcacttggtccccaggcctcggcttggacgcctgtctccacaggctcccagacactccgcacagggcagctgtcccgttctaggccctgggtatgggacatggaggccgggtggaaggcctcaatggggaggcagtaacaggatggtagggcgccctcctgccagggggtcccaccaagggcagccagcaggactgagacagaacccagtccctccccacccaccactccagagcatgcttcctggggccagcaccatgcctgaccctccgtgggtccccacatgagctggacaaatgaacgaccaaaagacaggaggctgtggtgccccacccacctggaccgagggaaagggcggaggggagggcgccctggtggtcccccgcctgaggccagggccatagatgaccttgcaatcccagccccccacacctttctctggcctggattcccgagggccccggggaggcagggacccccagcccaagtgtcctgcggccccaccaccagccccgccaaggccccaccccaagttctagaacctggctgatcactggcggtcagcggggacccaggagcggggaggggtggcgggaaggcaggagaaagttgagggaggcaggcgggcgggtggctaacggggtggtgggtgtgagctgggccaggcactgcccaccacccgcccgcccgccccgcagctcgggggccaatgagcagcggccggcctgatgtcaccctgcaaatctcagcctcgctctctaacaaagagaacaatggggcggccagagggaagctccgacgatgccaccgctggaccccacacccggggcctgccgcccgccggcctgcccagcaggctgcaccccagaagtggctttgacagccggtccttccccaggccccgaaatccctgactcggggccagagagtggagcagggaccctctcctgcccggtcccgtccccaccccagtcagggccccaggctggagactgagacgtgcgctctttgtactgtcagccttctctcccggtcctgcaggcggcccccctaagccacccctaaacctgcgcttgccccgccccgccgcctgtgctgggtgtggggcgccccccgcccggccggagccccgggccctcgagcccctctctggggtgcccctgcgggcggccgagggcctgggctgcggcgcggctccccggagcctttccgggctggaggcggcccagacaaaggcggcggcggggccggagcgcgcaggggaggagcgcgggctgcgcccaactttctcccgcggcggctgcaggacaaaggcgcaaaggcagcggccgaggccggagcccacgcggggcgtgtccggtgcggggcgtccggcgcgggctgggctgggctcgggcgacccccttccccggggcggacggtgcggggacccccaggacagcaacccccgacgagggccactcaccctggcgacccacgatctcggcgacgtgctcggagctgggcaccgggacgcactcggtcatgttgacgcttttcttgcggctgccgatcacgctcatctggtcggccagcagcgtcgggggccccagggccgcggggtggggcgcgaagcccgcgaacacgtcggggggcgacggccggggcggcggcggcggcgggggactcgcgttggggtccagcagcggcagcgacccgggggccacggcgggggccagggtcgggggcgcgccggcctcaggtccgtcggggggcacaggctccggagccgccccgccgtccgcgccccccgccgccgctgcgccgtccccggccgccccctcctcgtccgtgtcgccagcgccccccagcccgagcgccgacagctggtccagcgccaggcggagcgcggcggccgcgtcgtcgggttcgggcggcggccggggcgcgggcgcggcctcctgggcgccctcgggcgggggcgcaggtccgggtccggggtcctcccccgccgcccccacgccgccgccgccgccgcccccgcccccgccgccgtcgggctggccgagcgagctgggcatggcgggagctagcgctggggcccgcgctcctgccgcccgcgccgccgccgccgcccgcgccgccctccgcctctgcgagctgggccgccggccgcctgcatccagcggcgggggcgggcacggggggccgggcgggcggggcggcggcggcgcggggctgctcggggccgggccgggccgggccgggcggcggcagcgactctggctgcggctcggcggcggcggcgacggcggcggcggctcctcggcggccgaggcggcggcggcggcgcgggacgctccttccctcccgccgcctcccgcggccccgccccggccccgcccccgcgacgtcacgccgcggcccaacaatgggcggcccccagggcgcaggcgcgcggggcggggccggggcggggccggcgccgggcacgtggtccaggccccgcctccgcccggcgctcgggcgggaacccgggcgcatccgcacgtgcgggcgctgctgcaggtgtgtgcggctcagcccctgcctggacagcgctccctccccaagcctgagagtccctgcctcgcgcgccccagggcccgaggtcccgctccccaatttcccctagagatccgggtcgcccccaagcgaggtctcttgctccacgcccgcttccttgtgccagggacccccacctccctgcataaaggcgtggggtcctctccaagtccccctcgcgatcccactggacttcgaagtcaggctcctgcccgcccaccgcctctgtgccagggtccaacccccgccccacggtgcaccccccagggcctggggtcccagtccccaagtaccccttgctatcaggtgggctttagggtcaggcccctgccccacccccagcctctgtgccagggacagctccacaatcatgcacaccccagggcctgaggtccctctcccctagtctctcctagctcccctctggctggctcccggctttgggatcaggccacctcctccacgccacctcctccgccccacccaaggccacagacccggtctctgtgcccccagccagagacctctctaccacagtggtgcttccatggcgagggcaggctcacaccagccagaaccctccatgtggagccccaccctcttctggggtgcctttccccgcaacgggcgttgtccacct[138 bp omitted]acaaaaattagccaggcgtggtggcgcgcacctgtaatcccagctactcaggaagctgaggcaggataattgcttgaaccctggaggtggtggttgcagtgagtcgagattgcaccactgcactccagcctggttgacagagcaagactcctctcaaaaaaaaaaaaaaaaaaaaaaaatagccgctttcccagcggctcttcctccagctgtccttcggggccttccttgcacctgtggggttttttgtgataaacctgtctggctgggtctacctgcccccctcttctaccagacctgtccctggctggctgtgcaaacttggaccgaaggcagggctctctgggcaggagtggggcagcctgcccctttgcctagcaaggcttctcctctgtcccctccccccgcctcacacaccctgggtccccctcagccactcttctagtccctcagccacagccacccactgctgggcccttcacttttggtggcttctctgcccacttcttccaggcaggcagggtcaggatccccctgcctggagcccttccccacccaaaatctctctcctgaccccaggctgcatccagccccacttcccctcctggggtcctggacttctctttcgtgcacgcccatgcttggaattgtttttctatctctctttctttctctctttctttttttctctttctttcctttttttctttctttcttcctttctttcttttctttttctttctttctctttcctttctttctcttttttcttttccttttctttctttcctttttttctttctcttccttttcttttttctgtctttctttccttctttcttttctttcttctccttccttccttgcttccttccttttctttcatcctttatttcgttcttcatttcttcttttctctcccttccttccttccttccttctttctttctttttttttttttagacggagtctcgctctgtcacccaggttggagtgcagtggtgcagtcttggctcactgcaagctccgcctctgggttcacgccattctcctgtctcagcctcccgagtggctgggactacaggtgcctgacgccacacccagctaattttttgtattttttgtagagacagggtttcaccgtatcaaccaggattctcccttccttctctgctcccctcccctctcctctcctttccttttctttctttttcggacagagtcttgctctgttgcccaggctggggtgcagtggctattcacaggtgtgaccccaggacagatcagcatgagagctttgaccagctccgtctctgacttgggtaggttcagccctccttaggcaacctggtggtcctcccagtccagggaggtcatcatattaatgtagacgctggatcagcatagctcactacagctcagaactcccgagctcaagcaatcctcccgcctcagcctcctgagtagctgggaccacaggtgtgcaccaccacaccgggctactttttgtatttgtagagacagggtcctttttgttgcccgggctagtcttgaactcctaacctcaagcaatcctcctgcctcagcctcccaaactgctgggactacaggtgggtaacactatgcccagccacttgcaattattaatggcattgtcagccgggcgccgggcgcggtggctcacgcctgtcttcccagcactttggaagtccaaggcaggtagatcaccttaggttaggagttctatatcaacctggccaacacggtgaaaccctgtctctactaaaaatatgaaatgagccgggtgtggtggcgtgagcctgtagtgccagctgcttgggaggctgaggcaggagaatcgcttgaacccgggaggtggaggttgcagcaagttgagatcacaccactgcactccagcctgggcaacagagcaagactctgtctcaaaaacaaacaaacaaacaaagaaaaaaccctgtgtctaataaacaaatgaatttatgaatgaatgaagcaatgaatatttaattctttcccagttttggagcctcagagtcaaaactcaaggtgtgcgcagggccgcgcccccttcaaaggctctggggagcgtcctttctgcctcttccatcttctgggggctctgggcctcatcgctcattgtggcctcatcgctcattgtggcctcatcgctcattgtggccgcatcgctctgacctcggcctctgtcttcacacacccatgtctccctgtatgtgtcctggtttccctcttctcatgggaacaggagtcacgggatgagagtccaccccctcccgtacaactttggcttaacttgtctgcagagaccctctttccaaacaaggtcccattcagaagttgtggggttgaggacacagacatctttgtgcggacatgattcaacccataatatacctccttggttgtgacagcccagatgcccacaaacgtggcccctgggcccagagtcacctcaggtgggaagcgctggtgtaggtggtggcactattgtggtcaccgtgaaatgtgaaattctctcaggcccactctgcatctgatgttttttactttttcttttcttttcttttcttttttttttgagacggagtctagctctgttgcccaggctgcagtgcagtggcacaatcccagctcactgcaagctccgcctcctgggttaaagcgattctcctgcctc[134 bp omitted]tggcctcccaaagtgctgggattacagccatgagccaccacgcccggccgcgtctgacattttttcatgggagaatgttggaagaaaatcacataggaagggaggcattttgaccgggcagggtgggggttatgggagacaagaggagccgtgatcatcgctgatgaagcccaggggtgggcctgggggatccattgtcttgcttaggatacagtttttttttgtttgttttgtgtttttgagaacggagtcttgctctgtcactcaggatggagtgcaatggcgccatcttggctcactgtaaactccgcctctcaggttcaagagatgctcctgcctcagcctcctgagtagctgggattacaggtgcccaccacgcctggctaatgttgtatttttagtagagaaggggtttctccgtgttggtcaggctagtctcaaactcccgaccccaggtgatcctcctgcctaggcctcccaaagtgttgggattacaggcgttagccaccgtgtctggcctatttattattattatttttttgaagacagaatcccttcactctgtcgcccaggctggagtgcagcggcgtgatctcagctcactgcaacctcttcctccctggctcaagggattctcctgcctcagcctcacgactagctgggactacaggcacctaccaccatgcccagctaattttcgtgctttctagtacgtgttggccacactggtctcaaactcctgacctcaagtgatctgtctgcctaggccctgcaaagtgctaagattacaggcgtgtcccaccttgcccagcctgtacaaaaaatttaaaaattagccgggtctgatggcacacacctatggtcccagctacttgggagtctaaagtgggaggattgcttgagcccgggaggcagaggttgcagtgagctgagattacgccactgcactccagcctaggtgacagagtgaaatcctgcttcaaaacaaagaaaaaaaaaaaaaaggccaggtgcagtggctcacgcttgtaatcccagcactttgaggggccaaggtgggggcagatcagtggatcacctgaggtcaggagttcgagactagcctggccaacatggcaaaaccccgtctctactaaaaatacaaaaaattagccgggcgtggtggcacatgcctgtaatcccagctacttgggaggctgagacagaattgcctgaactggggaggcagagattgcagtgagccaagatcgcaccattgcattccagcctggcgacaagagggaaaccccatctcaaaaaacaaaacaaaacaaaacaaaactcagaaaggaaaaggaaaatgcacagggagaatcctgtgatggagaaggaaggcaggcaggacagcagagacaggagcattttattgcttgtaaattacatctcaaaaaacccacttcacacacgttaactggaaatatcttcaaatgaacggccgtgagcgtggttattttggtaaccagagaaggctaaaaattaaaactgtgaaaattaaaactgagcagggaaggcagttttgtggtctcatattatttgccctcaacaaaattcttttgcccgtggccaacatggtgaaaccctgtctctactaaaagtacaaagattagctgggtgtggtggcgggcgcccgtaatctcagctactcagcaggctgaggctggagaatctattgaacccgggaggaggaggttgcggtgagccaagtttgcaccattgcactccagcctgggcaacaagagcgaaactccatgccgaa[132 bp omitted]gaaaccccgtctctactgggggtggtggcatatgcctgtaatctcagctacttgggaggctgaggagggagaatggcgtgaacccaggaggcagagcttgcagtgagcagagatcacaccattgcactccagcctgggtgacaagagtgagactccatctcaaaaaaaaaactgtggaacattatcattaacttttgtgggtgccctttagccatttcccccagtccccataatccccagtcactggcacccacgtgtccccttcctgtctctgaatcggcctgtcctggacattcacacaaatgggattgcacgccgtgtcggtgtctgtgtgtctcttgctgagggtggactcctccaggggcatctgcgccgtggccggtgtcagagcctggttcctgttcatggccgagtcctgctccatggtgtggccgggccgggctgtgttcgttcatccctggatgggcacttgacttgtttacactttttggaccccttgaatctggagcgagtgtgacagaatctcacaggcagtgcccagccacccgctaccagaaagctgagtcttgctccggtatggccctgtccgaaagaacgttccggaagctgggggtgttttccatgggcacctccgggctcctggagatttgctgtgacagccatgagggacacacacaggcgaggggcatccccggggatctttgcggtggcgagtgtgtgcggtggtcagaagggctgtccctgtctgcctgggtctgggggctgcagggacagcaaggcacgggccctgggtgtggcaggagaggcatgatgccccttagctggtgttgctgagactcgggagccctgtggtccgtgtggctgggccgagggctgggaggtgcatcctcgccacgggggtcctgagcctctcctccctggtaccctctgtggcggcagcggtggggagcttggtctgaggggaggcgggggacacgtgaggctcttgctgctgctggcaagtgccagaagggctgccatggtggttcacacctgtaatcccggcaatttgggaagctggggcgggcggatcacctgaggttaggagttccagaccagactggccaacatggtgaaaccctgtctctattaaaaatacaaaaattagctgggcgtggtggctactcgggaggctgaggcttgaacccagaaggtggaggttgcagtgagcccagatcacgccactgcactccagcctgtgcaacaagagcgaaagaagagcgaaactcttgtctaaaaaaaaaaaaagtcccagaaggtcttggggctgagacatgggcggggctgggggcagccaagtggcctttgaggatggggccaggcaccgcacagggcaggctggtcatgaggcccccacgaaagatcccagcattgggagctcaggcttccccgccccatgccaggtctgggttctggggctggagtgtggagcctcggtgcgcccagggggttcagcctgagggtctgagacttttccagggcagggaatttgacgagggcctgagcactgggctggcccctcaggtgcccacgcctacaactcacttctcaccgggcacgacctctagcaaaggccagtattgccttggcctgtgggggtccccaaggtttcagggagagaggaaaggaccctcaagcttcgtcaacagcgacagcccagggcctggatgggcttccagtggggagggccctgtggcaggggtagggatcatcacatctcagaccaaggccaggacatggccagaaccccgggatcagagggactgatcggggtctgtcagtgacaggaagctgggctgcgacagagagggagagacagcaagagacagagacagagaccgagggagagagacaggagagagagcaagaaacaaagagggacagagagggagacggcgcaagagagagacaagagggagagatagagacagggatagacagagacagagagagaccaagggagacagggacacagtgggagatgggaagagggaaacagagtgtctctgagtgccgggcagatgaggggagggtggcctcccagccttcaggtccagaaagcagcttccagtggccatggctagtgagctgaagtccagggtcccggggcacagctcccctccctgcagcggctgtgcaggacctgaggacctggggggccctccctgccaggcagcccctcctgcttcccttcctttggaaggagcggtgctgggtctgagccccagcccatcttcctcaccggggcagcagggccaagacccacgatccctaggctgagccagcggcacctcagggggcacggcccttgcccacagatgcccaggccggcctggtcttctctgaatacccctaagcctgactcttgggttgtgaatgtccgcgaggttgggggacctgctggccctgtccccacaccgctttcagcctttcatcacccaaccaaagacagaagctcaaacgtgggcaccaaagtctagcggacgcaccgaactccaggctccaagcacatccacccatggtggctttattcagtcacgtccccacgcccacggctccctccaccaggcagacagaggggaggccaccccactgcaaagggtcccagccagtgggcaccaacctcaggaagacgtggtccccacctggagcttccctcggctgccctggcccttgagcccgtcctgaggatttgtgctttgactctgacagggagcagcaggaagctgccagcccactgcctccatgcgggtccttggagggcagacggtggagcggcgcttcctcagctcccgcggtcaggccccatcagggatggtcacagtccagccacaggggcgactctgcccatcagtccccctggggcagcgaccagatcctggctggggcagcaccgggacaggccctctctatgggcctaaggtcaatgcaggtgggggctcgctgggcccaggccaatgaacccacccgtaggagccctcactgggcagcagggccaggagggcaccagggactggccgcagagtccactcggggcaggcgtctgtggcttggaacctgccctcgccaaggcactggggggttaaggagcagatccctcagacggccttgggccagaagctccctggagagctgggcacctcgaggagcgtctgggagcctcaccctgtcccagtggctcctggcacccctgggagcgtcagcaccaccccaaagctgggtgcctgtgtcgccactaaacagaagggaaaccgaggcaggggggccggctggcagtggagcattctggcagcgccgggcgaccaagtcccgactggcagcggctggagtttggttttcagaagcgaaggctggcgttggcacacagggaaggctgcccgatgacgtgcctcgactgtgttacatttactgaaggagagcggcctcctgggcatgccactcaggcacggtgaggctctgtggcaccaccagccgcatggcagggcagagagtggcgccgtcctgcatgccccccacagcagaccagagtcccgtcctcacgctgcacagtgggtgatgtgagtttcaaaactacgcctccagaccgagaaaccctcccagctgtcagcaagccgtggcgccgagctgccgggcacctgctggctgctctccagtctcaaggagctgggacagcgggcatggggaggagctggcctcgagcccaaaggtcgtagggagccaggcagggcccaggagcacccggcacttcccgaagccggactctgtagaggacgagcgtggagggtctttcgggtgggggcagccccagctgtgtgccccgaggccccgggaagtggggacgggccgaggagggagccaggagcacggccttcctcctgggtgtctccaaggctgggcttcgccgccgagcctggttcacgtggggccgaggaccgcgtctgcaggcggctccagcaggcagcacgggctctcggcagggcctctggaaaggacagggagggctggctttagcgactccacgggacggggacgcttgggctcttctagggagatgggaagctcttgggaggcacccgtcatcccaagcacatctgtgttcaccaggcagtccccactgccaggacccgactccagggagcccccgtggccccgcagcacctgccctagacgtgctccatctccgggtccgggtcgggctcctcctcctcctcctcctcgtcttcctcgtcgtcgtcctcagcgcaggccttgtccagcggcgcctccccgtcacgggccagctcctccacgtgcgccagcatgtcggccatcagcgcctcctccagccgcttccgcacctgctgcaccagctcttcctgcttcctggggacacatggaccttgcgttacaccaaggtgagcggccagcaggacatggacacaggatgaacgtggggacctcagctgggaggggaggcccgagggatccacaggcacccccccaggaccagccctggcccgtgccacccctcccttcacaatccacgcagagaatgaccggctgccgctggccatcgccagcgtccgccaccctcccagatggcccccctgccacctctactgggaccaagggaggggcctgacccttcagtccccagacttggccctgagcctccccggggctcagctgtgtaaacccttgctcctgtcccttgac[132 bp omitted]cgaaaccccatctctactaaaaatataaaaattagctgggcgtggtggcggccgcctgtagtcccagctacttgggaggctgaggcaggagaatcacttgaacccgggaggcggaggttgcagtgggctgggatggcgccattgcactccagcatgggcaacagagccagattctgccaaaaaaaaaaaaaaaaaaaaaaaaaaaagcaagcctcaccaaaatcagctaccatcagcccgcagcagcccccaccctcgcaggccgggggtcacctttccgctgcccactatgcaccagcgtgtactcctttaccatggctcgggcggcctgagaaaaagaatccacaccctcgtctcaacccaccaccagggatggggggcctcctcctcggggcctacaagctgatgccaggcactccagggtggccgctcctctgcctgccgcctccggggccgcagcacgtgcttctgcccacctccctctccggctgcccaaagagcccgtctctgttctgctttcagtcccaggcaaagctgactttgtttctccccagttgtggccgaggctcagccgccccctgcctccggggtctctctccagcggctcctgcagacctgagctgctccctctcactctgtccccaccacccggaacaccctggctcacctactcgactgcagccaccacctgctcgtcatctttccagacaggaccctacctcctgcggaacccaccaccgagttcctcatttcaatgcccttttctatttctataagttcttattttatttttttaactctgtcacccaggttgaattgcagtggcaggatctcaactccgcctcccaggctccagtgattctcctgcctcagcctcccgagtacctgggactacaggcatgtgccaaaacacccagctaattattttatttttagtggagacggggt[138 bp omitted]atctgtctgctatttttcacagtcttgttcttttcttttgttgacaattcttcctatttcaccatcttcatttcgggaagttctctgagcgcgcagagagtgtaaatggacctcaaacccaaaagagggggcccagaggtaccacggccggaggaggatgccgccagccgctccggatggaacccttggcgcccacagtttgtgtgcttgtgggggtggcgtctcaggtccatctgttcaccctgtgtgggggcacagggtctcttcttgtgcccaggggcctttaaccccggctgctgccacaggaaacccgcatgcccagcgcctccctggccgttccgggtcttggctccttctttctggaaccgtcaagtttcctttccttcctctgacctaagccgtgtgctgcactgaacgtgaaaggtcccgtcttcgctccagcacttccagagtttcctgcaggcgcctccgtcaccaggcggccttgcgtccactctgcacactggaagtgggttcggccctgaggccccgcaggagggccgctcacccctgggctgctcagcctcacctgactgttgcctgtttctgagcggccgtgttccctgctgttcgttccgaggctctgcacatcagaactgcccctcagcaggcacccagagccatctccctgaaggcagagactcctggcctgccctgtccctccgtctccagggcccaacatggagcccagcacccagcatagccagtcctcacggactcaaaggaccacactcttttcaagaacattcctccaaggggtgcctggctcgccctgaacccaggacgcgggtgaaacggttcatactgctccgacgatgggtccccttgccctggctgtttctgtttcaaaaccccagcagcatcgtggggagacgggaagcacgcaggcacacggggacactcagggtccccacggccacaagagacagggtggagcagcaggggaccaggccaaggggctacctgatgtcctcgtcggtcaccatgaaggctttgcacaggggctgcgtggtgttgagccatacgccggggttcttctccacggcggccgagagctgtcccgtgatgggcatggtgctagtgtgcagggcgctggcgatggccgacagcagcgtctcatccgtgcagccaggtcccacccctgccaggcagtggacaaacagccgcaagtggagaggtcaccacggggcagctgtggcccagacaggccacggaaatgccccaagaatgggagctgccaccttcttggaaggaaccccaacttgggttccatttctaaattccctctcccgcttgtgttactacattcataacagaaaaaaaagcaagttaggccaggcgtggcgactcccgcctgtaatcccagcatcttgggagggcgaggtgggaggactgattgagcttaggagtttgagaccagcctggacaacacagtgagactcctgtctctacaaaataattcaaaaattagccaggtgtcacgctgcatacctgtggtcccagctactcaggaggctgtgctgagagaaccacttgagcccgggaggtagaggctgctgtgagtagtaacggcgccactgtacttcagcatgggccacggagaggctgccttttgtttttgagatggggtcttgctctgtatcttttttttttttttttgagacggagtctccctctgttgcccaggagagtgcagtggtgcgatctcggctcactgtaagctccgcctgccaggttcacgctattctcctgcctcagcctcccaagtagctgagactacaggcggccgccactacacccggctaattttttgtatttttagtagagacagggtttcaccatgttagccaggatgatctcgatctcctgacctcatgatccgcccgccttggcctcccagagtgttgggattacaggcgtgagccactgcacctggccttgctctgtattttctgtagagatggggtctcactatgttgtccaagctggtcttaaacttctgagatcaagtgaaactcctgccccagccccgccaagtgctgggattataggtgtgagccactgtacccagccgaccctgtctcaaaaaacaaccaccaaaaccatgcaagagctgcattctttgttctgtggtgtggacgtgctgggagagtacagaagcaaagtcagctgtccttgtttgtttatttaggatctccatggcaaaactgcacgtcctgcaggtgaaaacagccccaggcctgcgccacacctggaagccacaaagccccacccgcagggtctccaaggtcaagaatgaagggcccagcccaagcgcccttacccatccccaaccccactgggtcccctcctcctgccccagtcgctggcagatttgccctaagcacccaaagcaggaacagccatccaccctgccaggagatgagggcacctgcagcacctccaccccacccggcacatccccttccgcctcccctcagggtgcccgctcaccctgcaggcccttggggaggtccatggtcttgaccagctcctcagcaatgtcgaaggcgttcaggccgctcagcttcttctcccagaagagctgccccagacacatatgtgaacctcaagagtggccctgccctctccccactccaggtccttgctgggctccagggaggcccacctggcctccttgccccatgtgggtcccaatggggcatctcccctcccactgccttgggtctccagaccctgcccaggctttccacagccagggatccagtggacgtttgtaaataagaataaaaaatacacatggggtggctcacgcctgtaatcccagcactttaggaggccgaagtgggtggatcacctgaggtcaggagtttgagaccagcctggtcaacatggtgaaaccccttatctactaaaaatacaaaaaaaagtccggtgtggtgacgggcgcctgtaatcccagctacttgggaggctgaggcaggagaatcacttgaacccaggaagtggaggttgcagtgagctgagaccgcaccattgcactacagcctggacaacaagagcaaaactccatctcaaaaaagaaaaaaaaaaaaaaaaattagccgtgcattgtgacgggtacctgaaatcccagctacttgtgaggctgaggtggaaggatcacttgaacccagttgaaaccaggaggcagaggttgtagtgagttaagatcctgccactgcactccagcctgggtgacagagcgagactctgtcacaaaaaaaaaaaaaaaaaaaagaaaaaacaaaaagaaaatacacacggttctcaggtttttaagaagtaggttacacagtcacatatgggcagtcaaccccctgtatctgtgggttccataaccacacacccaaccagcggcagactgaaaatatttggggggaaaaaaaataaataaatacaacaactggccaggtgagttggctcacacctgtaatccccacagttttggaggccaaggtgggaggatcacttgaggccaggagcctgagaccagcctgggcaacatacagaaaccctgtctcgaaagtgaaaaacttaaaaaaatgaataaaacacacacaaggaacgtcacaagcatccacacctcatgagcaagctagaaaatacctgcaggtaacgtgcaaacattagaccatttccattttttaaaaatatttttattttatttttgagaccgggtctcgctctgtcgcccaggcaggagtgcagtggtgtcatctcggctcactgcaacctccacctcccgggttcaagtgattctcctgcctc[221 bp omitted]cagattttggtatctgggggttgagggtggggcgtatcctggcaccaataccctgcacattccaagaggggaccgcaggactgggtcttgctctgcccccaggctggagtgcagtggtgtgatcatagctcactgcagcctcagcctcctgggctcaagcaatcctcccacctcagcctccccagaagctgggaccacaggcgggcgccaccacgtccagctaattttttacttgttttttgcctcgtcatgttgcccaggctagcctggaactcctgcgctcactacgtccgctccacgtacgacctcattccaaacgtccacccaccaaagtgaacaacccggccgggaaggctggggtcgctgtgcgttgagctcacctggcgcggctggtccaccgccttctgcgggtcgctcttgaccttgttgctggggtggttggtaatcttggtcaccggctgcttgaagatggacgccgtctggcgcacgggcagcgccgtgttcaggtcgggcttgccctgcgggaggaaggatatgcagtccggcctgggggcgccccggcggcgcggagcctcagggggtgcggggcccgggtgaccccctgctttgccggcgcccctcgtgtcccccgcgcccgccaggacccccacggtccggggaggccgctcccgcagggtcggtccggccggctctggaacgcccgccgcgggccgcgtcctcgccatgcgccttgcgctctgcaccctgtggcctgcgccttccgctctgtgccctccgcccgctgtgacctcctgcgctcaggacgccgggctgtgtcgcctgcagctcacgtcatggccgcgtccccgcctagaacgccccgcgccgacgtcacctgcgtgacgccaccactcaccttgacctggttggaggagtcgtagcgcacgcgctggcggctcttgttcatcttgctcatcagcatcttgcccgtgcggaagtcgaaggtgctcaggtccatggagccgcccaggtagcgcgccagctgcggcttgctgcggaacttcttcccgctcgggctgcggggaggcgggacggtcggcgccccgggcggaccccagaccccaaacccaggcctcggccgcagacccaaacccagtcccagccccagcttcaggtcgcgaccccagccccagaccccaacacggccctgaccccaaacccaggcaggccctggccccagccccagaccccaaccctggcgtgaccccagaccttcatcccagaccccagcaccccacaactggcccctagatctgggcgccagccagacccagagcactggccccgatcctcacaccctggccctagccccagcctccacatcggatccttgctccagacccccaaccccggtcccctctgaatcctccccaccgtaggccctggcagcgtcaggcacagcagacgctgagttcgggtacaaacgctactacctacagggctttgggccccggctctgggaggatggctcacatgtccagaacattccagacatggaatttaggtcacattcttgagaaaagaccccacggagaacaggtatgtgagggacagccctaaaagcaatcttcttccaccttggggttacagcagcagggccagactgggaaggggtctcgttctaagatctggggccaggccctaacagctgcttgggcataacccgactggagagctcgcaacaaggcagccaggtaaacacagacctgctctcagacacggggctctgctctcagcctgccatggacaagcgccggcaactcatcctctccaggacataaggacacccaccaatgggttgccctgtgtgtcacatgaggtcacactacaggatgacaagcacccaacccaacacaccgtcatcatggttgggatgtaagatggaacagccatgttggaaaagcctgacagctcttcactgagtttccagatgacccggccacgccactcttaggtatctgcccgaaaaatgagcacgcatccacaccatcacttctacacggatgtccccaggagccagaaggtggaagcagcccagacgccttcaatggatgaacggacaaacgcccatccacacgatgggacatactcagccatgaaaaggagcgaggctctgacacaggccacagcgtggatgcaccttgaggacgccacattcagtgagagacgccagacacaaaaggccacacagtgtgtgatcccatttctaagaaatgtctagaacaggataattcagagacaggaaggggacgcgtagtgccagaggctggggtgcaggatgtggagtggctgctgatagggacaggacttcgtttctctctttccttttggagatagggtctcactcttgcccaggctggaatgcaatggctcaatcacagctcactgcaaccttgaactcctgggctagggtgatccttccaccttagtctcccaagtagctaggacgacaggcacaagccaccacgcctaatttttttttttttgagatggagtctcactctgtcgcccaggctggagtgaagtggctcgatcttggctctctgcaacctccacctcccaggttcaagtgattctcctgcctgagcctcctgagtagctgggagtacaggtgcccgccaccacacctggctgatttttgtatttttagtagagaccaggtttcactgtgttggccaggctggtcacgaactcctgacctcaggtgatctgtccgcctcagcctcccaaagtgctgggattacaggtgtgagtcaccgtgcccggcctaattttttttttttttaagacggagtctcgctctgtcacccaggctagagtgcagtggtgcgatcttggctcactgcaacctccgacttccgggttcacaccattctcctgactcagcctcccgagtagctgggactacagctgcccaccaccacgcccggctaattttttatatttttagtagaggtggggtttcaca[140 bp omitted]acccaggctggtctggaactcctgagctcaagcagtcctcccatcttccctcccaaagctttgggattaaaggtgagtcatcacgccctgctgcttcatttcttttttttttcatttttacttttagatccagggtctccttgtgtcgcccaggctggagtgcagtggtgtgatcacagcacactgcagccttgacctcctggactcaagggattgtcctgccttggcctcctgaggagctaggactacacgtgtgcaccaccatgcccagctaatttttaaattttttgcatagatggggactcgctatgttgcccaggttggtctccaacttacgatctcaagagatcctcctgcctcgacctcccaaagggattataggcggcagccactatgcctggctggtgtcttttatcttgataaaatcatttagaaataatagcacttgtatggtgcttactaggccaggtacctcaaacatattatgtctacaaactcagtcaacagtcacttttattaataatgcatcagcctgagattggtgggtagctctgttttgctgttttcccgttttcccagaatcctctagggcagtctcctcctgtcctcttctgcccctgccccagacgtcctggcccatggcagatgccagatgtcagacaactgagacagctcagaagaatctcccatagccagaaggaaactcaattctgcaggcactgcacagaaatgcttggtcccatgcttagctcaatcgcctctatccaggatctatgtactgggccgatacatagatcacaggaagttttatttctctccacccctgccccccaaccccgggcaaattccatggtccacaaggacacgggcaggctccagcatgtccagtaggacaggacgcctcagggagggcacgaggacaagtgcctgggggtctgaaaccactgagggctcttcccggagatttacttttgagacttaactcttttaattactctctggactggctgacgttcagtcgaagctggtttgcccagggcagtggaaagaaaccaagaaaccagaggctgagactcaggcttcatgtagccacaaggaaggaagaagagaccccacaaaacactcccaacagctctttgcctccggtcaccccaaagagaggccgttctgccttttaagatgaagggaaacaaggccgggcgcggtggctcacgcctgtaatcacagcactttgggaggctgaggtgggtggattgcctgagctcaggagttcgagaccagcctgggcaacatggtgaaacccgtttctactaaaatacaaaaaattggccgggcacagtggcacgtgcctatagtcccagctactcgggaggctgacgcagaattgggttgaacccaggaggcagaggttgcagtgagccgagatcatgacactgcactccagcctgggcgacagagcaagactgtgtctccaaaaaaaaaaaaaaaaaaaaaaggtgtaaggcgaacaagagacacacacagaccacagcctggttgttaagactgggggtgggcgcacaaggcagtggtaaatgggcctggggttctttctagggtgatggaaattctaaaattgaatctgaggatagctgcctatatccgtaaatatgtgaatatgctgaaaaaccattgactcgtgcactttaaatgactgtattgtatggtacataaaactgtatctcgataacaccttctcaaaaagaataaatgcagtggctcacacctgtaatcccagcactttgggaagcaaaggagggccaatcacctgagatcaggagttcgagaccagcctgaccaacatggtgaaaccccatctcgactaaaaatacaaaagtagccgggcgtggtggcacatgcctgtaatcccagctagctgggaggccgaggcaggagaattgcttgaactcaggaggtggaggtcgcagtgagcccagattgcagcattgcactgcaacattgcactctagcctgggcaacaagaacgaaactcggtctcaaaaaaaaaaaaaaaaaaaaaaaagaaggcaggcgcagtggctttcatctgtaatcccagcactttgggaggccaaggagggcagatcacctgaggtcaggagttcaagaccagcctggccaacatggtgaaaccccgtctctattaaaaatataaaaattagctgggggttgtggtgggggcctgtaatcccagctactcaggagtctgaggcaggagaatcgcttgaactcaggaggtggaggctgcagtcagccgagattgcaccactgcattccaccctgggtgacaaagcgggactacttctcaaaataaataaataataatgaacataaaaaattagctgggcatggtggcacatgcctgtagtcccagctatgctggaggcttaggaggcaggatcgcttgagcccaggaggtcaaggaatgcagtgagctgtgactgcaccactgcactccagcctgggtgacagaacaagaccctgtctcacaatgaataaatgaatgaatgaatgcaaatgcaagatagagggggttagtggttaccaggggctgggggagtaacaagtggggagtgactgctaatgaggacagagctgcttttcagggtgatgagaatgttctggaattagatagcggtgatggttgcacaactttgtcaatgtactaaaaaccactgggggccgggtgtggtggctcaggcctgtaatcccagcactttgggaggctgaggtgctggggtcaggagttcgagaccagtctggccaacatggcgaaaccccttctctactaaaaatacaaaaattagccgggcatggtggcagacgcctgtaatcccagctactcgggaggctgaggcagaagaatcgcttgaacccgggaggtggaggttgcagtgggctgggattgcgtcactgcactgtggcctgggccaagagtgaaactccatctccaaaaaaaaaccccactgaattgtacatttctaaaaagtggctttggccaggcagtggctcatgcctgtaatcccagcactttgggaggctgaggcgggttaactgcttgagtccaggaattcgagaccagtctagtctaggcaacacagcaaaaccccatctctataaaaataagccaggtatggtggcacgtgcctgtaattcccactacttgggaggctgagctgagagggtcgcctgagcctgggaggtcaagaatgcgtaagccgtgattgtaccactgcactccagcctgggtgagaccctgtctcaaagaaaaaaaacaaaaaaggtagcttttgtggaatgtgaattatatctcaattttaaataaaggttatgcccatctattgacacaaaatgatgtccctgagattttattcaatgaaaaaagaacagccttgataaaaccacacgtatagaaaaaagtgggcaacatggcctgaactctccccaggcacccccaacagaaaacgcagtctgggagcctgcagcctcagatgaagggctgggttgaggccccagacctgcagagggcggctctgggctgcctggcttcaccctctgcagagaaacctgaaatctctagcctgtagaggagcttctccctgcttttctccactgctagaccctcatgctcagggccagggcccagagtgggaatgagagaggtggggtgatgacagcctcaggatactccgctcaagctggccttggttctagctcccaagctgcagccacctcttagggggttcctgctgcctggacgcctctccctgtcactcaatgtcacgtcctcagagaagccctccctgaccccagtctcattcaggccccgtcatctgccctcccagatttcagcatgtgtcactgcagatctcaggacgtgtacagggttccagctcataagggtacacatttggggaccaagtttcccctctcttgctgtcctccaactttccaggaaccagtccctgagctcctcctgcaggacgaggccccacacattgcttctgatcacagccatcctttccccgctcacttttctcactttatctccccaaaccgggacagtcaagaaccacagaggaccgaagtgcacagtggacggagcggtcgttctgcccctccttggctcgtggaaaccacccgccctcacctgggcggtctcctgcccacgaccccgagctgtgggaaaaagggggaccagccgcacacccccctttacccaggtgctcggcacatggcaggcgtcctccgctttcccctcctgggggacctgaaggcgccacgggacactgaaccaaggggagggcgcaatcaaagctggcccagaatcaaaagcatctttcccgagccaggaaaaaaaaaaaaaagaggacaaacagcaggtggccgactgtctgggacttggctgcagcaggcgactaagtctttgttccacggagggggttccctgcgacctttcagagcagcgccttgttccaatttggggacgggggggtctctgaaagccttccaccaccagtaacatccacgcaaagactaccgttaggtgggctcggaaagtcgaaagcctcaggtctccaccctgagggggccacgacccaagaggaccagaggcctcggaaggagtcaaggggaatacctttaaaaaaagcaacgctgcgtgggagaccagtcaccctgaggcgcttattcccaggactggggcgagcccaagaacccgtattttcacgcacgccctccccgatccgcccatgagccctgctccccgaaatcccggctggccaccccctcgggctccgcgccaccccaggagcgccccaagaaggcaccccctgcgtctcacgggaaccaaagggacagcccaccctccacccctgccccccggtagcatctggccgccgccaggcgcccctggcccagcgcgcacgaacaaaggccgcagtcgccgtccggcagccagtccctgaacggccggccgaaagccatgcggcccaacaagcggcgcacgcgcactgggcctccgcgcgccgggcgcacacgcacgcaagacgcacgcacgcacgcacgacgcacgcgcggggcccaggccgcggcccggggcaggggcgccgaggccgccgcagaggccgctgggaggagcccgttgaggccctgcgcggccggcgcgctcattcacctatagtaaaagacatccctgtggccggccgacagccccgaccttctgggcacttcttccctctcccagccctgcgggagcgccgggcactcccacctcttccgctccattgcgcccggctcctcggcccgccgccgggcccgccgccgccgcccggacccccactcgccgccgccgcctcagctgcctccgctgccgctgccgccgccgccacttgccgcggctgttccggcccgcgggcccccgccctccgcccccagccgggcgcgcgccggctttgccgccctttcggccccctccccgcgctcgccagcccccgctcggggggcccgctccgcccacccgcccgcgcggggccccgcgctgcgcagccgcggcgccatgcccccgcccctctacggccccgccaatcagcgcgctgggagggggcggggccttaagtggcgtgcgcgcctgcgcgctgtgccttgcgagctgccagtgcccagcagctgtgcccggagtccgcgcggctccttttactgtgccctgtctctgccggccgcctggtgcgcgtgcgcggggacatgctttcggactagtggggtcctttcctccgacctttctccagcccaagtcttggggactctggcccagtgactggacctcgacttccccgccctcctggtctcccagcttccgagctttttacgagcgtccaaatctgggggacttcccccgtgaccaccccttccacgcccccaagttccctccagtagcttttttttttttgagacggggtctctgtcacccaggctggagtgcagaggcgcgatcttggctcactgtagcctccgcctcccgggttcaagttgttatgcctcagcctcccaagtagctggttccacggacggctaatttttgtagttttagtagagacgggatttcaccatgttggccaggctggactcgaactccttacttcaggtgatcagcccacttcggcctcccaaagcgctgggattacaggcgtgagccactgcgccccgtccagctgctttttgaaccctcaaaatccaggaatctgagcacccccccccagctccccgaccaccccctgcaccttagtccagccaccatctctggccgggagagttccaggaccttcctgcggaatcgcccaccccctgttgtctccccttaaccccttccccagccagccagagggatcctgaaatggaaacgggtgggctgccccccatcagttccccctgacagcgtcgctcccaaggctagggctgggcgggcctgcacaggtgttcaaggactgagtctagctgctgtgctcccctgcctccagctggagaaactgtcctggttctaaggactcttttgttgacattgggtccacccgatctgggatgctttcccatctgaagatctcgtcccattttcaaagtccctttagctgcaggttccagggagtaggacaggcacattcatttattgattgattgactgactgatggagacagagtcttgctctgttgcccaggctcgagtgcaatggcgtgatctcggctcactgcaacctccacctcccgggttcaagtaattctcctgcctcagcctcccaagtagctgggactacaggcgcccaccaccatgcccggctaatttttttgaatttttagaagagatgggatttgaccttgttggccagctggtttcgaactcctgacctcaagtgatccgcccacctcggcctccctaagtgctggggttccaggtgtgagccacagcggccgacggaacgggcacattttcgggatgttgtgctgaccacagaagcactgaataaatcaggatggatgggtggatgatggtcggatgccccgctcaccccacctcgtcgtgaggtgaggtgaggtgtgagacagccagctctgtctcccgagaagctcaggagctggttactggcctgagaccgaggccccatggcattgggctgccatggaagaatcagtgctcccaaggagacaggaaagtctatgctgtggactcaaagccaggcagttacaccccagaaccagccgtggtacctgactagggcagccagagcaaggcctgcccccatgcaagggagatgataattatgttttgagacagggtttcactttgttgcctaggctggagtgcagtggcgtgatcttggctcactgtaacctcctgagctcaagcaatgtgcctgcctcagcctcccaaagtgctgggatcacaggcgccagccaccacgcccggctgggagattattattatttttttaatttaattatttgtgttttttttgagacggagtttcgctcttgttgctcaggctggagtgcagcggcgcgatctcggctcactgcagcctccgcctcccgagttcaagcgattctcctgcctcagccttccaagtagctgggattacttgactagggcagccagtgcaaggcctgcccccatgcaagggagatgattattatggtggcacccgccaccatgcccggctaattttgtatttttagtggagacggggtttctccatgttggtcaggctggtctcaaactcccgacctcaggtgatccgcctgccttggcctcccagagtcctgggattataggcgtgagccaccgcgcccggccaagattatttttaaaattgggctatgattgtgacaatgcactccagcctgggtggtagagcgagaccttgtctaaaataagtaagtcaataaaatagtctttaaaatggccaattccaggctgggcgcagtggctgcataccagtgtgaatgtattaaagcactgcattgcacacctgaaaatggttaattttatgttatgtgaatttcacctcaataacaaaaaaagtgacccgggacatatcatgtgcacacaggagcccatttggaaggggtcacgatggccaaacagagaggacaacttgagcaacaaaattaaagtttataaaggatttatagtctgtagaaaaaatgtcatcaaggccgggtgtggtggctcatgcctgtaatcccagcactttgggaggccaaggcgggtggatcatgaggtcaggagatagagaccatcctggctaacacggtgaaaccccgtgtctactaaaaaatacaaaaaattagctgggcttggtggcgggcgcctgtagtcccagctactcgggaggc[135 bp omitted]gagtggatgctggtagaaataaatgactgaataaatggctgatgggaccacgagactgctcctctttacagtggagtccagtgactcactgtggcaacaaacacaggaccccatccgccagtctggctcctgtcacctcctgggctggcgagggcctcagtgccaccatgctgaagtctctgccttccctttcgggacttaagtaccaggacagcagatacagaaataggcaggggaagctcactgctactggggtctggtaacctacagattcagggctcaagtcacacaatttcttttttgagacagggtctcactctgccacccagtctggagtgcagtggcacaatcacggctcaccacagcctcaaacttctgggctccagcaatcctctcactgtggcctcccaaagtactgggattacaggtgtgggccactacacttagcctgcagacaatttttttttttaaatttttatatattttttgagacagagtctggctctgtcacccagactggagtgcagtggtgcgtgagccaccacgcacagacccctggccaatgtttttttaaaaatcagaacaaaatctggccgggcacagtggctcccgcctgtaatcccagcactttgggaggctgaggtgggcagatcacctgaggtcatttcaagactagcctggccaacatggcaaaaccccatctctactaaaaatacaaaaattagcagggcgtggtggcaggcacctgtaatcccagctactcgggaggctgaggcagaagaatcgcttgaaccctgaaggcagaggttgcagtgagccaagatcatgccactgcactccaacctgggtgacacagtaagattccatctccaaaaataaataaataaataggcttggtgcagtggctcacagctgttaatcccagcactttgggaggctgaggcaggagaatcgcttgaacccaggaggcggaggttgcagtgagccaagagcgtgccacggcactccagcctgggcgatagagcaagactgtcttttaaaaaagaataagtaaaataaatttctgttggttgagccatgcaaaatctgtggtattttgttatggcagccctagcagactgatataatagctatttccatcaacacacttatgtatgcagacagtatgtctaggatttttttttttttttgagtctcactctgttgcccaagctagagtgcagtggtgcaatgtcggctcagagattggcaagagctggaaaaaactgggcagctgtatcagggagtgtgactttgtaccatattctctttttatacctgttcatttttattttttcattttttttctttttatcagagacaggggcctctttgttgcccaggttagtactgaactcctggttcaagtgatgccccttcctcagcctcccaaagtgttgggattgtaggctgagccaccactcccagcctgttcatttttgtatccctaatgtgacagtttgaaatgtctaccaattctgatattcttcccttcaaaacacagaacctcattctcctccctctgcacgtgggctgggcctggggggcttgcttttgataaacaggctgtggcggaagtgatcacgtgagacttctcagggtggctcatagaagcactgtggcttgctccttcctctcccttggttcacctgctctggggaaggcagaggccatgccgtgaggatgctcaagcagcttcgtgtaggggcccccatgggaaggaactgtggctgtcaccgacagccacgtgagggcactggcttggaagtggctccagccccagttgagccttcctcagacgaagtggccttggctgatgtcttaactgcaacctcatgagagactctgggccacaaccacccagatacatcactcccaaatccccgactgacacagactgtgagagagtgaatgttcgttgctttaagccactacgtgtgggtgacttgttaaggcagcaacggatgaacacactgcagatactacttatgagccatttcaaataggcagtttctgtcagccattggaacactctcctagacttgcaacattctggagctgaaaggacgcctgggtcacctgtgccactccagctacagtcacagtaaccaagccaccagcatgatcaacatccgggcacggagcaggtttcagtgaggtttaatgcaacgtgcattaaaatatccaagctgttttcagaaacataagaagcctgaagctgagctgtgggtttcctcttgtccatcctgaggcttgggctgctccagatgcagcaggtgctgaggtgggaggagctagcaccaccaggcacctggagggagagcagacgaggc[131 bp omitted]accccatctctgctaaaaatacagaattagcctggtgtggtggcagatgcctgtaatcccagctccttgggaggctgaggcaggagaatcgcttgaacccgggaggtggaggttgcagtgcgccaagatcgcgtcattgcgctccagcctgggcaacaagagccaaactctgtctcaaaaaaaaaaaaaaaaattagctgcgtgtagtggtgggcacctgtagtcccagctacttgggaggctgaggcacaagaatcgcttgaacctggaaggcagagggtgcagtgagctgagatcgcgccaccgtattccagtctggcaacagagcgagactccgtctcaaaaaaaaagaaacgtcccttccatatgaagctggctgcggaagtggcccaggacagcagcctggcaggaacaccaatgcagcacaggccccgggctccacgcagtagggagaaacacagaccggagcagggctctgaggcccaggttcaaacagtggcatggcctcaggcctcaggccagcacctggaaaatgggggtgtaagagcacggccacgtgggactgtcatgtgggcactgggaagatgccacaggcactgtggttaagggggcagctggcatgctggagaaacacgtggatgcgtccagggcctcacaggcgcttccaagagctcatggggtgtccagccactgtgggccagcctccaccttccccctctgtctgtaacatgggccccacccagttcaggctgcagtgcccactgagacggaagcaaggtttgcctcaaagactcactgggattgtccagagggagggcgaggcccacaccccaatcacacaacccaaggctgcggggcggacagttctgtgcccgtgggccggagatgccagaaggggcacccagggccccactctcgaatgcaggtctctccagggggagcagtgagggctgccgccccggctctgggagcctggagaacccactcttcggccaccatccggccatcatgcagtccacccaccgcagcccactgaaacttaccagagcagtctgtgaagggtttgtgtaattaattatccttcttaaacttgccattgatgtaaggtacccagtccaggatcagccgccaatcggtggcccacaccagccccacggcgcccacagcgccccatgtgtaggccgtcgggaccctgcgagaggagaggggatggtcaggcctgctctggaccctttctccaagaccctctcctgcccaccccggccccccgtcctgagcggtgatggctgaggtgcgggcctggcacctgtgcccgcccagtgctgtgagccctgagggctggcaccagcagcacaggccctgcccatgctgccggctctcaggaagccagtaactgctcaaggggctgctggggtgggagtggagctggggggaggctgggcctggcgcatgtgtaggtgtttgtaagtttgcaaccaccatgatgatgggtccggtctgctgcagtctgcagaaattcatccatccctgccacagctgcaggactcaggcaggtgccgccatcacagtccctgttcccaggcgaggacaccaaacaacagacagggcgaggccctcacctgaggccacacagctggcgaggatcgaggcctccggttccaagctcatgctcttgcccaccacggcacgtgctgtgagagctcccctgagttgcctgggcccagcagattctaggaaggcccagcagattctaggaaggcccagcagattctaggaaggcccagcaaacccgcctgctggcgtttacgccctcgcacagtatgaacttgggcacaggcttctttttttttttttttttttttttgagacggagtcttgctctgtcaccaagctggagtgcagtggcgtgatctcggctcactgcaatctccacctcccgggttcaagcaattctcctgcctcagcctcccgagtagctgggactacaggcgcccgtcactgcgcctggctaattttttgcatttttagtagagatggg[148 bp omitted]ggcatcactgccgaggtcaagtgacaaaagactggcttcagacatggaggctcacaaggggaatcccagcactttgggaggttgaggcaggaggctcacttgagcctaggagtttgagaccagcctagacaacagagtgagaccccatctctacacaaaattaagaaaaattagccgggtgtggtggcacatgccagtagtctcagctactaggaaagctggggcaggaggatctcttgagcccaggaagcagaggctgtggctacaccaactgccttccagcctcggtaaa[131 bp omitted]gggaaacatggtgaaaccccatctctactaaaaatacaaaaattagccgggcatggtggtgggtgcctgtaatcccagctacttgggaggctgaggcgggagaatggcttgaacccaggaggtggaggttgcagtgagccaagattgcaccattgctctctagcctgggtgacaaagtgagactccgtctcaaaaaaaagaaaaagactggcttccatcctgggcacctttgtgcaacctctagctgcctctggagaagccagctgccatgctgtgagatgccctatgaagggacccatgtgg[136 bp omitted]atggtaaaaccccattctactaaaaatataaaaaattagccaggcaaggtggcgggcgcctgtagtcccagctacttgggaggctgaggcaggagaatggcatgaacccgggaggcggagcttgcagtgagcttagatcatgccattgtactccagcctggtgacagagcgagacaccgtctcaaaaaaaaaaaaaaaaaggaagaaataaatgaatccagccaacaaccccgtgagtgatcgtggaaacggatctgcctggtcacaccctcggatgagactgcagcctcacaagagagcctgaggagttgactcagtgcacccactgaaactgtgagataagcagcatttgctagtttaagcggctaattttgggagaccatttcttatgcacacagcactagataacaattgcaggtcccactgctggccaacagagggctgaaattaaaatccaattccgggcggggtgcggcggttcacacctgtaatcccagcacttccggaggccgaggcgggtggatcacctgaggtcaggaattctagaccagcctggccaacatggtgaaacctcatctctactaaaaatataaaaactagcccggtgtggtggtgcgcacctgtagtcccagctactggggaggctgaggcaggagaatcacttgaactctgtaggtcgaggttgcagtgagccgagatcgtgccactgcactctagcttgggcgacagtgagactctgtctcggaagaaaaaaaaaaatccgattcacctccctggatcacagcaaatcacacagctgggatgttggggcggtagggggtgctcctcctggaggcggatgaagaaaccctgcccacattgccccaaggggcctcaccagagactctccaagtgtaggccaggtgcccgctcaccagctgggggcacgcacagctgctcctggaacctggctcggaggcagatgccaccaacagggcaggaatcttcgcacgtgttgtcttgatggcattctggataagttatttatttatttatttatttattatttattttgagatagaatctcgctctgtcacccaggctggagtgcaatgacgcaatctcagctcacggcaacccccgcctcccaggttcaagtgattctcttgtctcagcctcccatgaagctgggattacaggtgtccactaccgcgcccgactaatttttgtatttttagtagagacagggtttcaccttgttggccaggctcttctcgaactcctgacctcaagggatccacccacctcagcctctcaaggttctgggattacacgcgtgagccactgcgcccagccctgggttattaatcaccagagaagcctgctcataaatatgcccagtgggccggcctccgcctcccctatcatcctggtcaccccatgtaggaccctgtggatttggacagtgtgggaagagcccacaaaacctgatttccactagccactgaggaaggacgtacagaccatgaccacactgaccaacgacctcgtcgccacgacaaccccttcctcaaagcaagccccagcagggcctagaaggggtgtggactgcagggtccccagctggtgaactgtggccctctcagtcctaagtctgagactctgagacacaaccccacagtgcctcctggggatgagacccgctccctagcctcccaaagccactgcctggtggcacagccctgcacggcccctcgcacgcacgtgtctgcaccccttcctctcccgcttcgttattttaggtcagccccacaccacaggtctcgtttctttacctttccttgcccaccaaccagaatgtccgcccacaagggttcggtctattggcgcgtccctaacacatagtaggtgctcaataaatgttgggctgggcgcagtggctcatgcctgtaatcccagaactttgggaggccgaggcaggtggatcacgaggtcagaagatcgtgaccatcctggctaacacggtgaaaccccatctccactaaaaaatacaaaaaaaattagccgggcgtggtggcgggcgcctgtagtcccagctacttatgggaggctgaggcaggagaatggcgtgaacccgggaggcggagcttgcagtgagccgagattgcgccactgcactccagccggggcgacagagcaagactccgtctctaaataaataaatgaataaataaataaataaatgcttgctgttggatgaaagcacggatgacgggtggtccccgctgtgactgaacacagaagaagcagacctgctgcacccgggaggggctgcactggctaccatgggccactgggttctcagctaggagcaggcttcctcatcccaggcctgagttacccacgctgtaaaacgccaccggcaccatcacattccacttgaaggtcccagtcagctccaccgtgcagaccctgtccccgacctgtcccccagtctgggatagaggaagtatgttctggcttccggagacactgccaatcataagcctttgcttttttcttttttagaaacggagtttcgctcttgttgcccaggctggaatgcaatggcacaatctcagctcaccacaacctccacctcccgggtttgagcgattctcctgcctcagcctcccaagtagctgggattacaggcacgcgccaccatacttggctaattttgtattttcagtagagacggggtttctccatgttggtcaggttggtctcaaactcctgacctcgggtgattcgcccgccttggcctcccaaagtgttgggattacaggcgtgagtcactgcgcccagcagctctaaatttttttgtagagataaggtcttgctgtgttgcccaggctggtctcaaattcccaggctcaaacgatcctcccaccttagcctccccagtagctgggactacagacaggtgccaccatgccctgataattttttgttttgtagagatggggtttcattgtgttgtccaggatggtcttgaactcccaggctcaagtgattctcctgcctgggcctcccaaagcactgggatcacaggccggagccactgcacccggctaagaccttgctgctttttttttcttttctctttttgggacacagtctcattctgtcacccaggctggagtgcaatggcgcaatctcagctcactgcaacctcctcctcccgggttcaagcgattctccttcctcagcctcccgagtagctgggattagaggcacccgccaccacgcctggctaatttttgcatttttagtagagacgcgggtttcaccacgttggccaggctggtctcgaactcctgacctcaggtgatccacctgcctcggcctcacaaagcgctgggatcacaggcgggagccaccgcacccagccaggccttgcttcttagcaccccacgtggaaacaccagacaaccctacggaggccacccccagcccggcttctatgggggccacccctatgccgtcccgctgcccacgtgggctcaggcgcagctgaagctttcacgctccttgttaaaaatcataaaaaccaaaatagtggcaaaggccgaagatgccgcgagtgctgggctggggatcgggactcggcaccttctgggcgcttccgtccagggggtcaccattcggatcccccggtagagatggggaaactgaggcttggagcggcctagccgcggagccgggcatgctggggtttggccttgggtccgtcacgtcccgttcacgccgggacgcgccgctccgcctctcggcctcagtttccccctctgtcaccgggaacaacaagggacctgggcccggcccggcccggcccccggaaacgcgcacaaatacggaacgcagcggcgcggggctgggccgaggcgggagcgcggatggggccgcgggtcggcgtcctcaccagttcttgaccagctcccggtagcgtgggcccaggaaccgggtcaccatcgcggcggagtcgcaccctcaggatgaccctgtccagctgacccggctacactgcgcaggcgcggccgcggcgcgcacgcgcgcggggagggcggggggggggggaggaaaaaaaaacatcatccgccactgtgcgcgcagacccggaagccacttacagtaacttccggcgagggttggacgaccgcggagaagtggtccggagtgggcggcgttagggcggtgctttctggccacgtggtctggcggccgattgtgcttctgggctccgcggggctacctgccagtgattttgtgcgcctagtatgtgccagaacgttatttacaatgaaggaaactgaggtccagcggggaagggtcttgctcagagtcacacagaggggaagagctgggattggagcccacttttggaggcgtcaggcgttgttcctgattcgctgtaggactttggtcgagcggcagtgcttccctgagcctcagcgttgcccgttgcttggaggccctgtcggaaatctctttgcaggattccgtttgcgagcctgggttattcctcattccggcagcagagggtggcctggctccttgctcggtgaacgtctctggatgctcttagctgatgacaggcaggtctttctgcctcctgctttccaccgcaccaggctcgcttgggctcgcctttctccagtccctgcttcctctgctctcccacaacccggcgcagcaccgtacatgctcactcagctcccagcttccagcctcccccctgcacaccgggccggtgtgggcagaaggaagaggggcatattcccagacaccgccattgcacttttgtgccttttcccccatattcaagagttgcctccctcaggaagccctcctggactgcctgacccacaggcacctttacagcatgaacggaaaggccatagcctagacggggcactgggcgtgatttgtctctcgggcgccagcgtcacttgcaggcctcgtgataaggaatggacaccgtgggttcttctgcccagcctggcctgtcctcctggggtcagcccctcagtacaccccaagcctgcagctctctggggactgcgggtgctaacccatccctatccctggttaaggactcagggtgggagccggaaataggttttggacaccacagtctgggcactgtttttctttctttttttttttgagacggagtctcgctctgtggcccaggctggagtgcaatgacacgatctcggctcactgcaacctccgcttcccgggttcaagcttctcctgcctcagcctcccaagtagctgggactacaggcgtgagccaccacacctggctagtttttgtatttttagtagagatggggtttggccatgttggccaggcttgtcttgaattcctgacctcaagtgatccgcctcccaaaatgctgggattacaggtgtaagccaccgggcccggccctgggcattgtttgtagaactttccagttggcttggggtttttgagcttgggatcagagagcacctgaataagactcttcccattggtggaaacttaaaaaagtgggatgcaggggctgacacagagactattaagagaaaggacaggaacacaagggctgctggaatgtcagcccagagtttccagatgccacaatgtaagagttcaccagtggccgggcacggtggctcacgcctataatcccagcactttgggaggttgaggcgggcagatcacctgagactgggagttcgagaccagcgtgaccaacatggagaaaccccatctctactaaaaatacaaaattaaccggacatggtgacggatgcctgtaattccagctactcgggaggctgaggcaggaaaattgcttgaaaacccgggaggcagaggttgcggtgagccgagatcacgccattgcactgcagcctgggcaacaagagtgaaactccgtctcaaaacaaacagacaaaaaaaagagttcatcagagacagtgacataaacaagagctgagagatggagagagatttgtaatgacacctggatccagctgtgcctgaagccattcaacatgacatagaacttcctttttgtttcttgagccggtttttgttattttgttggaccatctggatgtcccctccaccctttttttttgaaacggagtcttgctgtcgcccaggctgcaggctggagtgtagtggtatgatcttggctcactgcaagc[207 bp omitted]cctggcccaccctttttttttgacaggttctggctctgttgcccaggctggagtgcagtggtgcaatcacagttcactgccacctcaagcgatcctcccacctgaacctcctaagtagctgggactacaagtgtgtgtcaccaggtacaaccaatttaattttgattttttgagacagtctcgctctgtcgcccaggctagagtgcagtggtgcaatctcagctcactgcaatccctgcctcctgggttcaagctattctcctgcctcagcctcccaaatagctgggattacaggcttgcgccaccatgcccggctaatttttgtatttttagtagagatgggatttcgccatgttggccaggccggtctcgaactcctgacctcaagtgatccacccgccacagcctcccaaagtgctgggatgacaggcgttagccaccgcgcccggccaatgtatattttaaaagttgttttccagcatgaatttagaggccagctgggtagagtggtggacagggctccctcagcaccttctgtcaactcctggccactctctttcccttaaaaattatagacatggggtctcactatgttgcccaggctggactggaactcctggcctcaggcgatcctcccgcctcagccacctgaagtgctgggattacagatatgagtcactgtgctgagccttctcctccctaaggcacttgtgtgccaaagggctctctcctgggggccaccccccgtcaagtggccaggaaggcactccttccaccccaaccctgtaggggagcagggcagtccagctgtgtcctcgcagagatgcagcggccaagtccctgggcacagcagcagatgcctgccagtgggcactttgggatgagcagcgcccccacaggtcctgccacaccccttccccccgagagctctgtccgtgggttccgtgggcatccggttgtggaggaagtcacagatgccgcactaaggagtgtggggttgacgctgccagcaacggagccgtggaaggtttcagaggagcagtgacagactcagacttcgagccgacttcggagcaggaaggggcagggaagtgggttccaacagcccgggggggggacgttgggagatggggagccctcccagatgggggctgggaggaccgcaggtcctggatggttcctacgcgcccaagtgcagcccccagggagctgcttttccccgggagccaatcctgcttccaggtggcctggagccctgagtacacatgcaggttcccagccgccctgggagccatgggctcctcagagtgaggagtcgcttcgaggaagcccagtgcacagggtggaccacggtccttgctgcacccgaggtgaacgtcagggcccccccccacttcccttcctaaacatgtgacaccagaaagaacccggggactgcagggcatcgttataaaatgtcacgtttattgctacagtgctgttatatacaggacaggtctctgaatccacctgaaagagggtcgttttaaagtcccaatcatccagccagctgtgttgacacgtatacaattattttctttaaaaaaatttttttgaaaaccatcttgaggcactcagatcacaccccccaccccccataattgtggttcccaggaactgctgtttcttcctcctcgcgctgggtgaatctcgtttgaattctatgcagaacgcacagttccagaggctatggggccactgcccacccagacctaggggcagggccaggagcaaaacaagagggagaggcaagttcccttaagagatcaaactcccagggcgtaggggaagccaccgagaagggagaggcagccggacagcccctcccctccgcctggcctggactgggggcagataccaggcattgagctggccttgaggtttcccttgcatctaccatggggcccaggctcccaagccagtctggggaggggagtcaggcagtccaggatctcctgggggtaacggtgggagtctcaggagtggcacggggggagacgcccgacctgcagcggggatgaacacagccagcccaggggtccacaaggcctcaatgcagggaggggcatgaagggcacatgaaggcccccagctagccaggcccacacctgggtgccacagtgaccactgccctagttcgtgtggaactggatgggatcccagggtaggagacttgcagttttaaacccaagacagtccccagccagctgggaagagctggttaccctcatggcaaaagaccagaaaaggagacctggagagaggcctgggtgctgggacatgggacacagatgggcccgaggggacaccctgctggttctgcagcagggtcggacgcacagcccaaggccttcgtggggctcagaccagcacagtcccccggctccagccactcttgcccttggaccacacagagggagggcagcaggtgtggccccaggcccagggatgctccccagcattgggggaggctggccaggcccctggcatcctgtctacgtcacgatggccctctggtgtaatggggacatggtggggtggggtggggggtgtcctgtgctggctcctgagcagcatcctctcagccagagttcagagcatgagcctgggtccctggggcaaaggagtgaaggacagggtgtccaggaggtccccagcaccgggctccagggtgtggtccccatgccaggggtcactggtcccaacaaaatgccccatttcagagagctgtgcaggttccaagggagagcagcttaggggggcctggggagggcgttgtgtagggtagccctgggggccacagctgcttggcagagtcacctgggagggtcagagccaccttgctgacgtcccttcccccaagcccaggtcagtccccttcctgaggggagaggatgcggcagggaagccccaaggtgccttcatcagggaacgcccacgcatcactttccacatgacaaaaccaagagaacccccaacatcaaaaaaacaaaagacccgccgcctgtccccgttctgtctgtgtgcagtggcttccggggggggggggggacgggggggctcaggtttacacggggtctttttaatacaacgtttaatcatctggttgatcaagaaatgcaatgctcagtctaggaacagcagcagaaatagcgagagacacgggacttttatacaaaaaaatttgttgcttacaaaacatatgcaaaaaaagcttaaaaaaaccagagaccaaaggcagcatccttgctaattttcatctacattaagaaaaaaaaaatcttgtaactaatgtttttattttccttaaaaaaaatatttcgcttaggcacaatttgctggtggctttagaagaataagccaggtttccacagcatcccccttgagtgatatgtttccatttctccgctttttatagttaaggcatttttttcttctctgacaaagtgtatgttttgttgcttgctttcaggttttgtttactggaaaaaaaaaaaatgctcctgtcagcccaggcaacagggccaagatgcagtttcaggatccatgggacaggtcacagagtgacacggtggctgagattcggggacagggggagcgaggccagtgagtggtaggccagggccccagggagctcctggacccagtgtcaccttggccgcccccatcactccgaaccttgtcaggttggtgttggctcgatgctgacaacaggtgtgtgaggtgtggatgtggatgaagcccggggtctcgagtggccgttctggggccagagcacagggctgaaagcgggtggctcgtcccacggaggcatacctttcacatgtgcccggcggggttgtgggcttcgctcaggcctgggtggggagctgaaagcaccatctgggggtctccaaccacacctgacaccttttcctcttctcgccgtttcaaacaggctgctttgggattcaggttccgctctggagggaggggggagagctctgtgggagacggtcccagggaggagaaagatgtgaggtgggagtggggggtaggatgtcgggggggggggtgggggcagagccccatcacgtgtggcctcctgtatttccggctctcacctccttccttgagaaggctggggggatggggtggaggcttgtaaagaagagagtgggtatcagggggtgtctggggaacatcactgggtctgagtccagccacaaagacagacatggacagagtccgggggcggcaagcacaggaggaccccagcatctgcacctgggtgtggggaagggagagggtgctggggcagccctggccggggagcctacctcgcacctgctgctccagccccaggatgacctgcacggcctgctgcaggatgagcagcttggtctgcgctttgtccgacttgaggtgcatctggcacatgcgccccagctcccggaaggcctcgttaatatcccgcacgcgcacccgctcccgcgcgttattggccatgcgcctctcccggtccctcaggtctttctcctccagggacagcacctcgtccgtactgctgggtcacagcaccgaggcctctgttagtgatgcgccaaggctgggtgggagggcagggctgggttgtggagagggtatccagctacttgtgtttgtgctggtgtgggcagcagtgtgggtacacggctggtgttggtgggcacagcagtgtgggcagcagtgcaggtacatggcttacattggtgggcacagcagtgtgggtacacggctggtgttggtgtgggcagcagtgcaggtacacggctggtgttggtgtgggcagcagtgcgggtacacggctggtgtgggtgtgggcagcagtgcgggtacacggcttacgttggtggacacagcagtgtgggtacacggctggtgttggtgtgggcagcagtgcagttacacagctggtgtcaggcactgcagtgcaggtacacggctggtgtcgggcacagcaatgcaggtacatggctggtgtgggtgtggacagcagtgggggtacacggctggtgtgggcagcagtgcgggtacacagcttacgttgctgggcacagcaatgtgggtacatggctggtgctgctgtgggcagcagtgcagttacacagctggtgtcaggcactgcagtgtaggtacacggctggtgtcgggcacagcaatgcaggtacatggctggtgtgggtgtggacagcagtgggggtacacggctggtgttggtgtgggcagcagtacgggtccacatgctgatgtgtgtgttgtcacatgcgtgaaaatgtgcttctctgtgcacgcggcgaatgtgctccctggaatgcagcagagccccatggtggggcgcctgtgtgtgtacgcgactggctgcccaggtgcaagtgccctcagactcagctctaggggaggctgtggatgtggtcacacccaggaagacccaaggtctgactgttcccagacgtttctgtggagggagatggggccctgcttccccgtctgggagcccacagggtaactgcttctcccttgaccctgctcactctgtgggccccagggcagggctgggggcaggggaggcccagtgcctgctcctctctttgttcttccctcccaagatgatgactttccctgctcagagcagccacttgcggggtgatggacagctaggcctggccagactcactgtggacagaggaggccttgaagacacgggctcagcaggcaaatacctgggccactccaaaaacccgggactggggagtccaggactcaaatcagggctcacatggagcaaaccagctcccatcccccgagacccccacaccctggggaggagcctcagaaatgcacccgtcccctacagtgaactccggctgccccaagatgagccctccctgagctcctgcccctggctgggaaggccagctccctaggcctccaggaaccccattgtcactgccaccgtgaatggtcgcagtaggagctctgaggttccaagagcctgttctgtgccaggcccaaggctgagccccctctccagccgagcagcatgcagctggcgagcgggcactgttgctgctgccgcaggggtgcgggtcccggcccaggcctctgtgctgcatggccctgcatgggtgacctcgctctgttccctggcttcctacttggtagaatggatgccggtccccatcagggcacccactgctctaggttgtggtgaagatgaaatgggtgaaggtctggcccagtgcccagcatgcctggtgccctgtcttagtctctagggggctgcctcacccacttgcctgcccaccctgccttaggggcctgaggggatccctccaggtggtgggggcggcccctggagcccaggacaagcgcacagaccaaactgacaggaccaggggctgcgtgctcccgggtctggtttcttcccgcaagccctgacggggggctttgggggaggaaacgccctgaggttgcagcccagccgctcccggtgctcgggcagcaagtgcgaggtgaggaggggctgccacgggaagcagagggacggacgggcgggatggaggggagggcggaaggcagacagcagagaggcgggcttggggggcgcgaggcgtgccacacacggctgcagagactcggaaaccttagagctgaggggatagcgtgtgggccgggccggggctctggctccggtcccagcaacagtgctgcaggagagaaagggttaacggggtgcaggcgaggaaaggaaggagttaaggaagcagccgccagcgccagcggggggaaggagtcagctcacatctgcgggtggggacagggtctgtctgtatccttcctccccctggccctgggaaatgggggtgataggaagtttccctatcaccttcagatagggaaactgagtcagagacaggggatgggctcatgtggccttgcgtggcatctgcctgacgggaaggggccagggtggtttgcacaccagctcctgtctctgggatcgggggacactggcctctgtgagctgggttctgggcttcccaagaaaggaggaccacggcgagtgggagccccgtggagctgggagatacagttctgagccacagagcccaggcctgaaggactaggggtccagaaagagtccagtcctcccactgtggaggggatgctgaggcaggcagggagaagggctggcagtcaggagtggacagtcatggcaatgcggtcagaggggtgaagggcacagtcactgcaaggaggcaactgctgcagagggagggctggctccaggaaggcgggcggggaaggagaacgagggcaggaacacgagggagggtggcgctgcagggacgctggtggcccgcgcccccactgacctcgcacttgctgctccaagttcaggatgaccgagacagcctggtgcaggatgagcagtttggtctggggcttctcgctgttgaggtgcagttggcacatgcgccccagctccttaaaggcctcgttgatgtcacggacccgcagccgctcccgggcgttattggccacccggcgctccttctcccgctcggccttctgctctggggggagaaggtcgtcctcgtcctcgtctgggctatggggagggcgccgggagggggccagagggagacagtgaggttgggggaagagcgtggggcccgccgacggcctcccagtgtgggtgcggtgtgcgtgtggcctgtgcacatgtgcgtcctgatggggtgagggtggggagtgccgaggggtgggttggcacctggtccgggcccggggggccttcagctccttcttctcctcctccgagtggtcagccgctgacgtgttctcctcgtcctccttctcctcccgcttgatctcgctggcggccgccgtggcacctgctcgccctagccctgcaacaggcctagggtcaggggcctgcgtcggcctccagggccaactgacatatctctttgtgctcctgtggtgagggacttgggctttcctggaaaaaccaggtcttggccaaaaataaaaacaaaaaaccaacaaccagaactggatccctacctcacgccatgtgtagctaccaatgccagacagattaaggaccacaagatgaaagggaaacagttttaccacctttggaacaaagtgtgtagaaattctgcagcaactcaatggcaggaatctactaagatgctaaaagaacactcttcttttttggtgaaagtaaactgtttcaatcattaacttaaaaatatggaacacttcggatgggcacagtggctcacaccagctcacacctgtaatgccagcattttgggaggccgaggtgggtggatcacgaggtcaggagatcaagaccatcctggctaacatggtgaaaccccatctctactaaaaatacaaaaaattagccagctgtggtggtgggtacctgtaatcccagctacttgggaggctgaggcaggagaatcacttgaacccaggaggcggaggttgcagtgagccaagattgcgccactgtactccagcctgggtgacaaagcaagactccgtctcaaaaaaaaaaaaaagaataaaactttggaacacttcaggaatgtccacgtcacccttgtgcagatgctatgctaatctttatcattctcattttagtccaagagctgtccaagcaagtgctcaaagcgctgcttttgaaagaacacaggccgggcacagtggctgactcacgcctgtgatcccagcactttgggaggctgaggtggaagggtcacttgaggccagggggtcatggctaccgtgagctgtgatcatgcccctgcactctggtgtgacagggtgagaccctgtctcaaaacaaaacaagtaaaaaagaaaaaacaaaaatcagtaagctggactatatcagaattgagagttcctgatcagcaaagataccaggaaaagaaaagcatttgccaaagaatagaagacacccaccacagatgtagccaaccaggaggtgatctcccacaatcaatgggaaaggacaaaaagaaagtaactcagtagaaaaataagcaaggtatccaaaaaggcatctcacagacaaggaaaccacatggctagaaacacgtggaagtccgcttcagcacatcaagagattaaggaaatgcaaattagggtggctttgcgctaccctttcatacccagtcagctagcaaagttgagggacctgaacagtcaaaatcttgcctgtgggagggcaacttggctgctttggaaaataattcatcagcctttcctctgaattgacaacaggtgtatcacacccttgatcagcaggttggcaggaaagcgtgatgttggaatgacctacagccccacgcccgggccagggccaacggcacactcacaatgggaccccagccgctcacaccacacatgtaccccacacacaacataagccagcaaaccagcgtgtaaagaacacgctagtgggacgccgtgttcatgaagctcaagaacaataattgcaaaacatgtggcttaagggtacacagtgccccaaatgaatgcggccactctgcattcagcagggcctgggccacccccaaaacccgggcttggggagtccaggaatcagtcagggctcacatggagcaaaccagctgccatcccctgagacccccgtaccctgagggggagcctcagaaatgcacccgctccccacagtgaactctgctccaatcggccaacgccagccaccaggaccagcccaggcctcagcacacgaagtgaaggacaggaaggaaacagaggggagcctatgggtgaaagactaagcttggggctgcccctggaaactgctgacctgtgggtccggacccttctctggggtggggccgtcctgggcactgcagggtgctgagcagcatccctggcccccacccactccatgccaggagctcccctcagccctgacaactgtagatgtccccagacatcacccagtgtcccctgggggcagagccgctgcggtgagatgccctggcctaggagtgatagaatcaaggtacttggaaagtctgcctggaaagcaggcaggattcctgggctggtggaaggcacagggccaggacagcgcccacaatgaccccaccttctcctgggcctctcatgggtgtctgagacactcaacaatccccaggcccaggtccagatttgtccccaaccttttcctttgtccccttccttacggagttcccagccccagtgtcacccacagctcgggccagaaatcccagagccaccctgccttctctcaccctcaagtcctgtccatcacaaatcctgtgggccccgccttcaggagatgcagggcccacccactgctcacccctccaaggcccctggaccagccctgtggcctctgccttggtctcccggtgccactcatagtctgtcctccaagcagccaccagagggtatctgtgagcacctgggtcaggtcccatccctcctcagccctccacggctgccacctttctcatggccaaatcccaagtcctccccgcagcccacaaggccccgcatgacctgccctgccccgccctccccccttccctctctccctctcctcactctgctccaaccccacgggtctcctggctgttcctcccaggtgcagtccagccccagggcctttgcctgggctgcgccctctgcctgaaaccctcctcctccaggtacttgcctactcttgcctcctcccagatgctgcccaaacaccaccttgtggcctcatgggccaccatcttcaaagccatacaaaacccccaacccaccgcagccacttcgttccttctccctggcacctgtactgtgcagcgagctcctggtctgtctcccctgaggcagaggcatcctgctgcacccctcgccccttccccagtgctgagcgctgccaggcacacagcgtctgggagcaggcgaatgaagaggcagcccagagctgtccacctcacacgcccagggccaacgccggccccgccggtcttacccaccctcctgaagttgctgactggggcgcccatgtcaccaggtgcccccacggtgacacctgccctgggctcccaccctgacccccaccactagagtgcctcagtttccccaactggaaccaggagtcggacagtcccaagctcaagggcttaccactgtaggagtcgggaggccgagacaggtcagggagggtgcctggctggctggggagggccgcgtggttgtgcatgaggctggtgctgcctgcgaggccgtcctcggggtggctgcctccaacctgcaggcgtggggagacgggtgcatcagggggagccgggtccccgcccactgcccagctccaccctcgcccagcgctcaccaggcctgcgtgccgcccgcccagtgacatggggccggtgaaacctgaggccagcgccccgtggccaggcagcagcgtgtgcatgtcgccggctgtgcccacggcgtggctgcggagcacgtggatggcctcgtccaggtggtcttctatcttactctgctgcagggtggggggatgggtggtgaggggcccaagccgagggaccccacaggcctccattcatgtcccttccgcatgcaagtggccggtggtcccatcttccccttccccaggaagctgcatatgccaggcatctggcgcccgggagcacacacaaaatgtgtgtgccttggcggccacgaggcctcaataacagcttggggcttatttacaagaaactaacaaaaaggtttctccttctcaaggagcgtctgtcctgcaaattctgtcggggaagggtggggtggggcggggcaggcactcaccaggccgtggagacccccgtcgtagctgggcgataaggcaccgggggctcctgctcgaggccactgtgacgttcctggaagggagtggggacgtgaatggggtgcgaggggcggggtgtgagcatggcctgatgcccatggggagggattcatgaaccaccccgcctgtccagcctccggtgatgcccaagatggccattccggggcaccccacactgatgcaaagctgctcggccccgccaggcagggatgctgggtgcccagtgggtactgccattcctatctctgagcctcagtttccccatctacaaaatccaactccccactcagaggataaagtggctcggcagcacacagtagggggctcctccccatgctgccccaccctggctgacccacgctgggctccagcagcaggcaagaaagtggcaagctccaggtgggaccagacaggccgaggtgaagtgagggttcctggcgcttcccatgggggcagagatgaggactcacgggtgtttttaaacacccagaccttctggaaacctccagttctcactccccctcctcctgtacctgcccccgaccccctgcggataagcaagcacgtcctcacagggataggagggtctgccctcccatgccggagcaccgcacagggtaaacagtcagtacctaataaatacccagtgggtgagcaaatggcaacacgcacacattctagagtccaggccacagccctggcgatgctggccccatcggacctgggagctgctaggcacgccaatgtcccctcatgttcacgcagtgtgaactgccaggtcctgcctcctggctttgcctgtgctgtgacctaacctggacgccacctcccagccctccctcactgcctggttatgtgctatagccttggagggctggcttggaggctgcctccactaggcagctttcctggattgcccagtggaacacaagcccatgggggactcccttccaccgtcggttcctgaccagcgatgccacgggcccttgggggccatctgctccctccccgctgcctgcctatcccagcaaggtgcagacaccagaaccagcctcccctcccccgcaaagccttcacagacctcagcctcccctccccccaaaccctcacagacctcagcctcccctccccccaaaaccctcacagacctgccaggccctggggggagcccacgggggtagaagggctggacgagaagttattgcttgagtgatccggggagtagatctgcgaggaggaccaggagagatgggcggtcaggggccggcctctcaggtcacttgcctggccaccccccatgccccacgcctcaccgaggccagtgctttgccgagggcatccccggagctgccagctgtggtccctcgggagcctgtgggtgaagagaggtgaggcccacgcagcccggcctgggtgctgccgccgacggcaagctctcctgcgttctgccgtcctgcacagacactgctgcgccagggagagcagcctgactcgggtccggtttctgtctgaccccctgaaaccagcctctgcaggggttgaggcactggggacaggccactggcaggggaccctgggtgggtgagtccccttctgggcctgggtgggtgagtccccctctgggcctggatgggtgagtccctctctgggcctgggtaactgagtccctctctgggcctgggtgggtgagtccctctctgggcctgggtgggtgagtccctctctgaccctgggtgggtgagtccctctctgaccctgggtgggtgagtccctctctgagcctctttcccagctgtaaggcgggaaagccgctcctcaaagatctgtttccagacatcccaagcccaacgcacgtggcaggccctgcagacagcggacaatgagaactgacaacaacccgctctcagggccagcagacgcgcctgcgcctcccgtggagtcctcgccaccccccacccagaccctgcctggagcccagtgtcccctcggagaggccgcatcccagggaggggccatacccaggaggctgtcggccccgctgacaggcggcgtgtggctggagacgccgccgtacgtggctccgggggctgaggagaaggaggatgcagatgggagcccaccgttcacctctgctccatgcagctggtagccctggggggtcaggcaggaggagggtgggttagatgggcactgccaccctccgcccaccccctgccccctgccctgggtcctaccatacgctcgtgctggtgcaggccaccaaacgtgctgctgcttccactgctgcccaccgggccgctaccgggcgggaggggcagcggggatgagcccccacccagcatgggcccgaagcccgcctggcccgggggactccagagctcggctgaggggtgcaggctgccatctgtggaggggagctggtaaggtgggggccgagtggggaaccccagccctgccctaccgtccctggcgagcccccgccctgccatgtacctgccacgtagaagggggcgggataggtgctgctgggggtcttggcggacgggtaggcggtggcatccctgccgtagtcctcacctgagctgggtgggtacacctgcgggcgggtgggcggtggggggtgcagtcaggacggagggaccacgatcagcccatgcaccttgccggcctcctgtcccctcctggtagcacatctaccaccccgtttcccttccctgtaaagccacccccctttaggtaaatcccagcccctggccaagtttgaggttcttatgatgtcctggtctctctctcctactccttttccagcccccacctcccgcctccctgaacttctgacctttgtacttgaggacttggatctggctctgcctactaaacctttttcctccttaatccagaaaactcctatcgacccatcaaaaccccagctccaacaccccatcccatccttctcccttgttccccagctggaatcaatcttccagtgctgagcttcccttggtcccagagcaacattcgtccttcactaaagtaacaggaagaggggtctgtgagtagcgccagctctgactggttggcactgcctggactgtggggctggggcctgttggtaacgtctgctgctgtgctggagcgggaagtatgctgggtgggcctgatgttgtaataaactggggggcggtttcagggcagagaaagtgcaccctggggaaggaggggagtgagtgatactgttgggagcagagcctgaccacgcctttggcctgggaagtcaacctgactctaaccccgaacccaggcctgtggggagctggtcggctggaggggtgaggagatgtatgcccagggctcttggggccagcacaggcactgggcagagggtggttggtggctactgagccagggaatcggcaaattccctctccctccagcgagatgagaccgcaggagtgtggcacagcagcctggaccatctgcgaggcctggtagggaggcagggatgcggggcag[132 bp omitted]cctccgcctcctgggttcaaacgattcttctgcctcagcctcccaagtagctgggattacaggcacgcaccaccacgcccggctgatttttgtatttttagtagagatggggtttcaccatgttgactaggctgatctagaactcctgacctcaggtgatccacccacctcggcctcccaaagcgctgggatgacaggcatgagccaccacacccagcacaattgtgccctttctaaaggggcctcagccaccaggactgcctttctctcaaaacaagacagacagaggctggacctagggaaggacttccccgccttcccttggaggcggcctcgggtcagagctcagatcttggctcagaaatcacagggggcctgtccactcagggcccaccccgccatgtgtgttcccaagcttcgccaggacacagggcctggcactgccactgacgagctgtggggtcccttctccctcgtgcgactcaccgaggatggaagacccggcgggaccttccggaccttcttgggctgcgtgtctgttagaagcaaaaggggtgagaaccggccaccggccatgagaacaacccctgccctacaccctggaggagagaccctcacaattcccgtttcatatattaaaaacctcgggtcggctgggtgcggtgcctcatgcctgtaataccaggactttgggaggccaaggcaggcagatcacgaggtcaagagatcaagaccatcctggccaacacagtgaaaccccgtctctactgaaaatacaaaaagtagccgggcgtggtggcgggtgcctataattccagctactcgggaggccgaggcaggagaatcacttgaacccgggaggcagaggctgcagtgagccgagatcgtgtcactgcactccagcctggggacagagaaagactccgtctcaaaacacaacagcagcagcagcaacaacaacaaaaagccccgggtctatttatacggctccaaagatgtcgaagaaccacgatggttttctcccgcgacgcgcagtttggaaaacgaggagttggtggattctaagccaaggctctgctgagaagccccttggccccaccctccttccaagatggccccgactatcccacgcagtcaggcttcaccactaggggctgctgtttgcaaactcgcctacaggataaaatccgtaacccggaaaccagcactcaggcgccttcctgatcactcacggacgtgcgcacagtgggaaaagttcgagtggcccaggcgcatgtgcccagccaaggcggaacagaggcctcctcccgcatcatggggctcctgtccttggtctattcagagccacgatcttttacgtttttgtgctttttgtgggtgatttcacgcttatttttttcaggcagggtcttgcgctgttgctcaggctggagtacaatggtgcgatcgcagctcattgcagcctcgaactcccagggtcaaaccatcctcctgcctcagcctcctgagtagctgggaccacaggtgtgtgccaccatacttagctaatttttaaaatttttcgcaaagatgggatctccctatgttgcccagaatggtttgcaacttttggcctcaagtgatcctcctgtctcggcctccagagaagctgggaccccaggtgagtgccgccatgcctggcgactgtgctgcctggaatgggccccgggtagttcaaggcgccgtccagtgctcctgagcccgaggctgtgacgtgcctcgcgggggatgcccgcgtgtgcagcagggctcagtgcagaggagccacgatgcagccccatgaggcatctgacacagaaagcacatggcagagcccgtgcccgtcagctgcaggaacctcgggaccagaggctcgtaggaacctctccctggacgtgccacgcccgccggcccctgcctcgaccccccgtcaccgtccatccctcccacggcccgagcgcccgacgtccagccaggacctggaaggtgcggggtctgctccctctggtgccctcagctaacgggaagcctcctacctccctttgcaggctccctcccagaagcccccgatgccccggccagaccccgctcacctaggctgccgtctgccgctctccgccgggagctgccggagtaggaggggtagtactgggaggtccccttcatgcccgaaggggacaggggcccggggctgttgagggccagctcgcctgacaggaagccagcctggtggggagcggatggtcagaaagcgcccagctggcatccagaccccaggctgttccattcaagaaaaaactgcaaaggccgaagccactcagacccgccctgcagtgggtgatgccccttctgcctgtcacggtgtttctctgtgacacctgctgtgtttttctgacttgagactgaccgcatcccacactgctgttttcacgaagaacgaaagactgagaaacagataccagtgtggccaacccaaggggctgctcccccgattctgagacgcaaagtacaaagctgcgtggctaagcgtctgtgcacccggctgcttcctatctttttggttttgttttgtaaagccctcggttggattctgtacatgttagtgtgaaacgggctttcttcctggggagccagggctgccctgagccgggtcccggaactgactcctgcatttcatccgttctaaggccgggcacggtggctcacacctattatcccagtactttgggaggctgaggcgggcggatcacctgaggtcgggagttcaagaccagcctgaccaacatggagaaactccgtctctacaaagaatacaaaattagccgggtatggtggcacatgcctgtaatcccagctactcaaaaggctgaggcaggagaatcgcttgaacccaggagacagaggttgcggtgagccaagattgcgccattgaactccagcctgggccatgagcgaaactccgtctcaaaaaaaaaaaaaagaatcatctgttctatcatcatccagtggccccacggggtggcccagcgcccaggacagggccttctcccgaggcccggcctgtcctgagcccgcaccctgtgtggccaccgcggggctcgatgagtcacccgggagcgccagagagcagggcccgagccctagttctgcttctcggatggggagcccgggcacttgcgtattcctgtctgtaaaatgggcacgtaggccgcggcccctcgttgcggggactgatagggaaacgcgcatctgcccctggcgcagagcctggcacccggctggccccctccatcactatggctactgttgctctggcttgggcacagtgagcacacagacggccccacctgtgacaaggccgagccccaccgagagctaggagctgacggcggggacagagatgaagtcctggggtgagggaggaaccctgggggtgcccagcaccggaggctgcatgggacccctgtggctggtcacagcccccaacatcctcccccagcctcacaaccagggccagcgtgggtgaggatctcggctgcacaggggcctgttgtatgggctccccagggggtccacacctgcaaagccctgctgcatggcctgttttcctgcctgccactcagaggagagggcaaccgagcccctccagctaagcatggcagccctgcaggccttggcctccctggtcctcacctacctcccctctgctcccggtccacacccacccagcccaccctggcccaagcccagcctggtttcgctatcaggaagcaaacataacctagctaagccaggagagcttctgcagatcagagagggtgggtgacagatttgtttaaaatcaaaatacaccccagcccggcccgagcccctcacctgagtcaggccgcccacgcctgcgtctctcccgaaggaggcataggcgccccgctcaccgctcttgcctgcaaggggagaaggaaggttagtgggaggcgaccccaaggaacatcctgagggcccccgagtgcctgccatgtgcctacaataggctctcagtaagtgcacacgactgagagcgccacggcaggatgctggcagagcctgaccccagtgtgcccatctcggggagccctggccccagtatgcccatctcccgcagagccctgccctcagtgtgcccatctcctgcccaatgacaggcttggggacaagaaggggtccccgatgatttcggggccaactctgagcatctgcagcccacagaagccctgcccagggggtggggcggaaaggggacagcagagctcacggggtgaggtgggaaggggacagcagagctcacagggggtgaggcgggaaggggacagcagagctcacagggggtgaggcgggaaggggacagcagagctcacagggggtgaggcgggaaggggacagcagagctcacagggggtgaggcgggaaggggacagcagagctcacaggggatgaggcgggaaggggacagcagagctcacggggtgaggcgggaaggggacagcagagctcacagggggtgaggcgggaaggggacagcagagctcacagggggtgaggcgggaaggggacagcagagctcacgggggtgaggcgggaaggggacagcagagctcacaggggatgaggcgggaaggggacagcagaactcacggggtgaggcgggaaggggacagcagagctcacggggtgaggcgggaaggggacagcagagctcacagggggtgaggcgggaaggggacagcagagctcacgggggtgaggcgggaaggggacagcagagctcacggggtgaggcgggaaggggacagcagagctcacaggggatgaggcgggaaggggacagcagagctcacagggggtgaggcgggaaggggacagcagaactcacggggtgaggcgggaaggggacagcagagctcacagggggtgaggcggaaaggggacagcagagctcacaggggatgaggcgggaaggggacagcagagctcacagggggtgaggcgggaaggggacagcagagctcacgggggtgaggcgggaaggggacagcagagctcacgggggtggggcaggaaggggacagcagagctcacagggggtgaggcgggaaggggacagcagaactcacggggtgaggcgggaaggggacagcagagctcacagggggtgaggcggaaaggggacagcagagctcacaggggatgaggcgggaaggggacagcagagctcacagggggtgaggcgggaaggggacagcagagctcacaggggatgaggcgggaaggggacagcagaactcacggggtgaggcgggaaggggacagcagagctcacggggtgaggcgggaaggggacagcagagctcacggggtgaggcgggaaggggacagcagaactcacggggtgaggcgggaaggggacagcagagctcacggggtgaggcgggaaggggacagcagagctcacagggggtgaggcgggaaggggacagcagagctcacgggggtgaggcgggaaggggacagcagagctcacggggtgaggcgggaaggggacagcagagctcacggggtgaggcgggaaggggacagcagagctcacggggtgaggcgggaaggggacagcagagctcacagtggccctgcttcctgctggccaggcccctgcccttcctgagcctcagtttcctctgtttcaggcgttgaggggctgatgccctggggtgctggggtcagaggcatttgtctgtcccaggggacaggcctgggggccctggcggggagccccggggcctgtgcacaccgcatcaggttcaccgcacaggctcccccaaagtgcccagcattcagccttcaggccagggttcattcgcgaatgagcacgtgacctgcaccccaccaatgagcacttccctggggcgctcagtgacaaaggacaggtgaggcctcggggctacggagggggtcagctggccagggcgagcccccagcatggaaggcctgggctacggaggggaacagctggccaaggcgagcccccagcatggagggcctgggctacggaggaggacagcctgccggggcgagcccccagtgtggagggcctggggctgatgcggtgacacctggatccagccttgcctgaagcaggcaccccgattactcaggacctgagccacttaaatccccttctggctgacactgggcacggaatgtgactggggctgctgtgaggggctgggacgcgcgatcgagtaatgtacattattctcaaagcaggaaaaaaatttcccgatttttgaattttaaaagttcaacgatttcccaactcctggaacaaatgctgctgttttttgcctcccgtttcctcatcttggtgacccggggggacatggggaagatgacagccacgacccaccccacaggccacacccggccacagcagtcactcgcccggctcctcgggtgagaaaactgaggccataggagactgaggttatggcaaaagccccccgtgcctccccgggacccccgcctgccctctccaagctgcctggctatggcctgggccccacccgtgggggtggcaggtgggacatggctgggctctgggcattgctggccgggccgtgggaactgcccacgtcagccctgcccaccctggggccatcgggggtatgaggaagaggctgggaggaaggaacagccagtgaggaaccaggctcccaggtgcaggggccacccccggcaggggggcggggccaggcctcacctaccccgtaaggggaacgggcagaaatcgcccgtggcacgtggtgggccctcagacacacccgccagaccttcacgctattcgcttcctactcaggacaccaactgactctactgtactccaagttcgaggccgggcaaagcgagacaggaccgtccctgccccgctgtggggcccaaacaggcgctgcccctcagggtccagggaaaaggctgggtcggccaaagtcctccgggcctcagtttccccgcaagccaacaatgccgaggggtacacggtgagcacctgggccccgcagcaggtccagtgccccacagctcccggcttctaagcagcgcacacccccactgcaccacgaaaagccagcagaaacactgcctcaaaccgtcgggttccagagaagggaaggatcccgcatcccaggatgactgagggatgaaaccacaaattccacagctgaggcactggggcaggaggctgaccacgacagcgggacccctgaggcccttaccagccccccaagcagcgggacccccccaagacccctacctgagcccccgaaccctggggcacaggacttgacactcccgcaggaggcggagcatgtgaagctcggggcatttcctgtgtcacccgcaggagggaccgcacacgggacactgtcccagtcgcagccccaggtgcctggaggagggcgtcccagtcagccccacccagccgcagacccccggccagggtgcccttcccaagcgtcggttcgttcccctgcagcacgggtgagcctgcagcggggctggaatatacccaagaccaggcaccaacccccacctggcattgggcagggcctgcagagctgggtcagtcctcaccgcctccctccaagaaggttctgggagggtccctttcccacagtggggaaactgaggctcagaagaggatggcgcttgcccaggttccgtggtggggtgggaccagacaccaggcctgagtcttcattctttttttttttttaagatggaatctcgctccatcacccaggctggagggcaatggcgtgatctcggctcactgcagcctccacctcctgggttcaagcaattctcctgcctcagcctcctgagtagttggcactataagcatccaacaccatgaccggctaatttttgtgtttttggtagaagcggggtttcaccatgttggccaggctggtctcaaactcctgacctcaggtgatccacccacctcgctctcccaaagtgctggtattacaggcgtgagccaccgagcccaacctgagtcacgattctctcggttaacaggagggccccccagggaaagagggcgggcgggcggtctgcggaagggcatgggctctgaccaccgcacactctggccgccctcccgagtctccagaactcctacgcctccttcccagcgggcacaggccagcccggctgacccctccccgggaagcaggaggagccctgcagaaatcccagggaggaagtggggtctggaacggcctccctgcctctacgctcaggcggggaagcctagttgcagagtgccgtgccagggagtccgggccacgtcccctgcacctccccgcagctgctcccaggacgggcagaggcttcggctgtccacaccctctgggtgaacgctggggacttgcctggcgctgtgcgtgcactgaccatgccaaggcccacgtctgcacatctgtgcacagcagagggaccgcaccaggccaggcactcacctccgagtcccggtcccaggaatgtggatgaagagaggctgctgtgcgactcagtgaagtgggtgccctcgctgaaggtctaggggagatggggtggggatgagaggtgctggggcttcacaggccccccctccaccccgcattacagctggagaggcaggactcaaacccatgtcccccagtccaaacccctggaaggctggccccttctctcagcctcagtttccccacacccctcgcccccaactctggggacaggaaactcagggtctcaggcctcacggggactcctacccggctggggtcaaaggaggagctgctctggtcgccgctgccccaggagcctgagctgggccggtcctcaagacctgcaggcaggacagagagagttatgggtcaccctcacgcctgcccagctctaaaagcttcggttcatcatctcaggggcaaacctcagtggacccggggggcttgtggaacccttcctaacccagcctcacccagcccgactcatgaggacaccagtcagcagctaacacccagacaccctgggactcggagcacttacaggtccataaacttaaattaactcttccgtcggctctctgctggccaactcctacccacccactaaagccccagctttcataccctccttgggcaaagacctcactctcacgccgagcctcctccccatcagccccaagtccctccctctggcccagccctgactatgtggactggggtctctgtgtcagatgcagactcttctgaccctgtgagaaaggctcatgacagcatgagggtgtggaagctaacccatgagctctggggaggcccagggtctccctgtccccacctgccagtgtgggaagtggggccgccctttgctgaagcagcagcagaggctcacccatcgggcaggaggctggcagcccgtgagggtggagccgaatctcatcacccaggaacaagcccagtgtggagaccagaagcctgcgtggggcaggagttcccggcgcagcaagggacgggacgaggaccttggtcccggggcggggcgggcggggcccttatctctcagaacactcacaggcaacgcccaggactccagaatcttctgccctgggcagggagggcctgcttggatccttcccccttccatcgggggccacagagcacacccgtggagaagcaggagcgggccctgggcctcctcagcttggccacggagttgctgccctgccttggtttccctctctataaatgatttacaaacaggccctacttttgcagggctgggggtgtccatgtccaactcccaagtccagaggcttcccgagagccaggcctgggggacccagcccagtgctgatgtctgtgaccggcaccacctcaggctgttctgcaggctcccccgccccgccccctgccctccctgctcatccacaccagaaacttctttcaaatcgcatccttctatttcggtgcctttgtgttaatcattccccccggggagtattggtgtttaattgctgtctgatttgcataattatgcatattaatctccaagtctaatgaatattcatgcgcctcatttagattttgttttctaatcaaaaatttccaatgtgattatgagtggggggctgggatgctgccttggctgggttgggggccaggcagggggctcctgtggtctccaggaatccacacggcattcgctgccaggtctgggccatctgcaccccaagatcctggtcctgcacgtgggccctggtgaacagggcagctgctgaggccagggtgggctggctgtgtaggggtgggcacagcgccggcaccctctgggtctcagtttgcctctataccacctgcatgttgtctggtcccctccggccatagccagtaccccaggaggtgcagagacccccaactgagcaaacgggaggctcctggcaccccagccctcatcccctggaaggcctggtgtggtgggggacctcctggggccccatgcccagggatcgcccccgaagttcactccaacaggcctgtgccagaggcactgcggcctcaatctgccctttgggggaaccctccctcacccagccttggcctcctcctagaaatgacaaaaataaggacagcccccacattaatacagttattaaaatcccccccaccgattaatgatgcattttaataacccaccatgaatattcataatgcatccattgctcctgttctaattaaaatgtactaatagaataagacactgctgtcagagtgtggttttctgtgatttctttggtgaagcaccgcagagttttacccgggaagggcaccttcctgccctgggccagcctggctgcctcgggagaggcctgcgagtggacggcgcaggggcgctggggagagggccccaggagcggcccaccccttgggcttcagttccaattccagtcacggggtgtggaagccgcccacctgcctgggctgccgtgaggataacaatgaaagatgctgcttcagagaggccatccgtagccaaggaatgctccaggctggtggtttcccagtcccggtccctgttgggtcccctcctgagagggaccggggactggtctttgcctggtggctcgttggcaaatgggagagggaggcttcaaaaggcgcttagtaaataccgggtaggactgagattggtctgcagcagggatctgcaaacagtacacaaggaccaagtctggcccctaagctgctttttaaataaagttttattggcacacactatgcccgtttgtccatgtactatcaacggctgcttttgctgcaacagtagagttgaatcaattccaatagagaccatctgtcctgcacagccaacaatattcactccttggtcctttccggagaaggctggctgaccttgatacagaaaaagactgtccaagtgccttcagctgcctctgcacaagaaacccaatcgacagacttcagtaccaggagtggggttaccatgccgggcaggcaaaactattggtggacacgggccctgaacacagccctgtgtaccgcccctgccaaaccctcaggcacaccaccaggtggtctggcttcagatgggcctggggacttcatcctatagccccagctctgcaatgtgcccccactcaggtgctcaggctaaagtcctgggagtcctcctcaccttccctcctcccaaagaacagcagcttgccccatagctacagcagcgggttaagcccagtccctgcagcagcttccttccaagtctgctgacatcctcaggcagccggatggagcctttagaagcaaaacttggctcttctccctccctctaccctctctcatggctccccaccgtcctcaggataaagaccaaactctttcctgatctcaccactctcctcttccccaacacaggaggtgacccccacccacaccccctgcctgagccccttcccagcctgggacccctctttgtctgcagcactgcctggaacacagctgacgcccccaaaacacccaccctcaacgtcttcattttactcataaataactgtgcttccaagaacattttcctggaggatcaaaatattctccacctctgctgtccaatacggggaccacactaccaactgctggaaacgtggccagcattttttcaagcacattaaaaattacatttaaaaatgtgtatatggctaatgcctgctgtactgaacaacccagtccccaaaagcaaatgaaataacagccaccaccaaataccacggtcacgtctaaaaaccaattaacacctcgacagctcctcacgcaggttccgtttactcgggagtaggagcgggccacccgatacagggtcactatgaccccccaagcccgtgcctcgccccgtctcttcttcctccttataattaaaatcgtgaaggaccccgatggcagcctgtcccaccgccctgcctgggtctggcccctgcagcttgtgatgcttctcagacccattcccagcccctctgggggtcatgacgggtgagatcagacagaggtttgaatccgggggtggcctttccttgggtggagcagtattttaaaaaattttttttttcttttgctttgagacagggtcttgttgcccaggctggagtgcagtggtgcgatcttggctcactgcaacctccgcctcctgggttcaagtgattttcccgcctc[131 bp omitted]gcctcagactcccaaagtgctgggattacaggcatgagccacaacgcctggtgaatttaaaaaaatttttttgtagagatggggtctcactacattgcccaggctggtctcaaactcctggactcaggcgctcctcccaccttgtatttcccaaagccctggggtcacaggcgtgcacagcctccattttatctaaattcaagctatgggagaagatgaaagaccaggatgccctcggcccagctcgcgcactgcagccgccctgggtttatcttcctgtcgtgtcttcttggtcagggcccgcaggctgtgtagcacatgctcccagcttctgaggaggatcccgagtgggggagaaaatgcttctggggcaccacagagcccttccttgttggggggctgacgagatcccgcaaagcctcccacttcgatctgcctctaatgtctggcgatggggggtgggacagcagggccctgtggcccgcccgcgagcagacaaacctgaggctgaagagaatgtgagtggagaccacacaccaccctaagagtgggggtccccacagcacctaaagtggcaggacgtgccctcgggtagaggcacagtgaggctgtgcgggcaacacaggcaacctcctccgccagaaccggggacgcctcgcaacctcctccaccagcacgggggacaacctcctccgccagaaccggggacaactggcaacctcctccaccagaagcggggacaacctcctccaccagaaccagggacaagctcctcccccagaaccaggggcgcctcgcaacctcctccaccagaaccgaggacgcctggcaacctcctccaccagaaccgaggacgcctggcaacctcctccaccagaaccggggatgcctggcaacctcctctaccagaaccgaggacaacctcctccaccagaaccagggacaaccttctcccccagaagcaggggcgccttgcaaccccgctcccccaaggccctggggtttccctggagggcagagctggccccgagagtgggcatcgagcacagatgttaagtaacaactcagagaaacagggccccgctttgaatttcagtgaccacagagataaccgagaccccatcccgctcttgcttccatgtctatgggcatcaccagtgacacctgagtgtggggacc[139 bp omitted]ggtgaaacccccgtctctactaaaaatacaaaaattagctgggcgtggtggtgggcacctgtagtaccagctactcgggaggctgaggcaggagaatggcgcgaacccgggaggcagagcttgcagtgagccgagatcgtgccactgcactccagcctgggcaatagagcgagactccacctcaaaaaaaaaagaaaaagaaaaagagacacaagagggaacccaacatggaacaaaaaggatgaagttcaagaagttcaatgatttaccctaaaaaacgagaagactgtcttaagcctgtaagccccatggatcctcaaagaaatggcagagcctgggggttctatggaatgaagtagacagtgagcacatttaattacgaatcaagagattcctagaagccgtaacaagacaggcacacaaggaaagccctctgggggcactttgtgagttctctctcatttcactgaatccttgcagtggctacattacccctaccctacagataaggaaactgacgcaaaagatagatgccatttgctcaagccctcacagtaagtagcaaagtcactatttaatgatacaaatgtttcctagtaagatgcaaatacacaattatgaacagatacaatgtttttttgttttttttgtttgtttgtttgagactgagtctggctctgtcgcccaggctggactacaggcgcccaccaccgcgcccggctaatttttttgtatttttaacagatacggcatttcaccgtgttaaccaggatggtctcgatctcctgacctcatgatccgctggcctcggacaatgttttttaaaagtagcaatttattggtagcaaataccagcagggaagagaaatatacaggctcaattttcaccttctcacagaagggggcagatgcgatttcacttcggacgttgagagcgcgagaaacggcgtgtttaaacgtgttcttcacaacgcagaatactaaccgctattcaatcacggccttaaacgtgttattcaaaactagaaaagaaccactggcagagccgcaaagcggtacagagcttcagaaaacacacaccgggggaagcaatccggagttgggagcacacagatggaaaaacaaaataagacgatggaaggaaaagctgagaacgaagatggacgggtgcttaacgtctttaatctgaaaacacggtgccgaccaaagacagttttgaaacaagcgactcaggagatacaaccaggagcacaaagatctgccaagccacaccaacaaaaaggaagggttgcaaccttcatatcgaagtttcaattcaagggaggtttctttttctgagacagagtctcgctgtgtcgcccagggtggagtgcggtggcgcgatctcagctcactgcaacctctgcctcccaggttcaagtgattctcctgcctcagcctcccgagcagctgggattgcaggcacctgctaccatgcctggctaattttttatattttagtagagatggagtttcgccctgtgggccaggctggtcttgaactcctgacctcagaagatccacctgccttggcctcccaaagtgctgggattacaggcatgagccaccaccaccagccaaggaacggatttttttgttgttgacaatggctcgacccacaacgaaatcccactgtctcagcccacacaagcccacaatcctggcatctaaatacgtcaacagagaaaccgacaaacagaacagagggggatggcgctgctctcagcctgacattaaacagattaaaaatctaaatatggttcaaaggcctcgcagctccacatccaactatccctcaagtactcacaaagaaggacaaaaataatccatgtttcagcctcggcagaggagctctgcgtcctccaaacagtagctaccgtttaagccaaagctgagttttggcactggagatctagaaatcaagaaaggacctccaacttggaactcagaaacctctgaagcaacctgacctgaagaggaaattaggaaaaaaaaaaaaaaaaaaaaaaaggaacaaatgtcagtaatatgagaaaaacatgcattatggaaaccaatgggatggggttcacggggtggaaccctcaacaccacactgatggaacagaagagggcagaagtcagcaaaaggggcctgtgatctgaaagtcaccaaaaactttagaaagagaagaaatgccgataaagaggaaaattgatcaattgatcaatatcgatttgccaatgaagcagattctccagaagaaaaatcaacgagagagagaaaatgcacagggcagccgagtcaagaacaaagaaaccacctaaaagttggcgcattgaggaccgcggcgccctcagcctccctgcgcaggtggaaagacaggcgcctccaaacgttatcaaagagccgaacggggccaggcgcagagggtcaggcctggaatcccagcacttttggcacgggtggacagacaggc[136 bp omitted]cctgcctctactaaaaatacaaaaaattagcgcaatggttactaaactctctaagtttcagcttctttaccagtaaaatacggtaataattacacctatttcgctaacctgttagaactgagaattcccagtgaataagccaagctttgtgtccaatgcacagtgctcaagaaacactgatgtaagcagtggctcacacctgtaatcccagcacttcgggaggcc[133 bp omitted]ggcgtgaacctgggaggcggagcttgcagtgagctgagatcacgccactgcaccccagcctgggtgacagagcatgactccgtctcaaaaaaaaaaaaaaagtgatgtaaattgt[136 bp omitted]cgaaaccatgtctctactaaaactacaaaaaattagccaggcatggtggcaggcacctatattcccagctactcaggaggctgaagcaggagaatcgtttgaactcaggaggcggaggcggaggcggaggttgcagtgagctgagatcgtgccactgcactccagcctgggcaacaagagcaaaactcggtctcaaaaaaaaaaaaaaagttaatgaggcagcaataaaaagaaaaaaaaaagatacagccaacagcttggctggatctccagggaattatgctaacgtaacagaataaaagctaatctcagaaggttgcaaactataggattccatttacacaaaatactcaaagtgaaaaattgggctgggcacagtggctcacacatgtaatcacagcactctgggaggctgaggtaagaggatcacttgagctcatgaatacaagatcagcctggagaacacagcaagaccccatctagacaatatttttttattcttcagacacggtctccctctgtccccgaggccagagtgcagtggcgcaatctcagctaactgcaacctccgcctcccaggttcaagtgcttttcgtgtctcagcctcccgagtagctgggatgacaggcacgcaccaccacgcccagctaatttttgtatttttagcagagacggggtttcgccacgttgactaggctggtcttgaactcctggcctcatgtgatccacacaccctggcttcccaaaatgctgggattataggtgtgagccaccgcacccagctgaaatttttctttttttttaaacagagacagggtttctccatgttgcccaggctggtcttgaactcctgggctccggcaattctcccatctcaacctcccaaagtgctggggattaccagtgtgagccgctgacccagccctctacaaaatacatatttttttaattaggtggtcgcagctgctcacaaggctgaggtgggaggatcagttgagcccagaacttcaaggctacagtcagttatgatcacaccactgcactccagtctggacaacagagtgagacctggtccctaaaaaaaaaaaatcgtacagatgaagaacagattggtgattcctgggcttaaagaaggtgcatgtctcaaaactgcacagaactacacacacacacacacacacacacacacacacacacgcacgcgtacacacacgcacgcagacacagacgcagacacgcacacacgcgcagacgcacagacacgcacgcgcagacgcacacacacgtgcgcacacacgcacgcacacgcacagacgcgcacacgcacagacacacacccgcacgcacacacagacacacacacgtgcgtgtaaagccggtggaatctgatcaggatctgtggacggcaccaatgtcggcttcctaggtctgacgcagcaccacgggtgggcgggacggtacccctgggggtggctaggtgagaggagaacactctgccacttcctgtgaatcccgaaagacttcagaataaaaagtggatcaacttcaaggacgagggcccaagagagtaacagaaaattcaccagagagccattcacagggtcaatccccttccgagaagaccaccgccctctattaaacaagtggcaggtgaaaggacacgatctttgtcacctattaaatgagacaggccgtgctgtcaccacgttggccaggctggtctcgaacacctagtcccaggtactcctcttgccttggcctcccaagtgctgggattacaggcctgagccaccgcgcccggtcacaagggacgctttcaatgtgaaaaagcatccagggacccagcaattccactcccagacacgcacccggaggaaatgacccatgcgccaggttctcccggggtttcctcttaaagcagaacgcggaggtgccgttctgtggattttcactctgaccgtgtgtcacacttacaatcgcacggacagagaaagcgacggggaaatgaaaaataggaaagaactttcctttggtccgtcaataagcaatttcctggtgtctcccgtggcctcagagcctgtctgtcttggcagaagataggctgtcactcagagacctgtgcctgagggtttccaaaaatgggaggcggtgggtgggagaaggcgtacgaaaattattcccgttttaaatgtcttccgatccagacaaccagaaaatcttggtttcctattcgttaatctctaatgccttttttgtttcgtttctgttttgagacagggtctggctctgtcacccaggctgcagggcagtggcgcaatctcagctcactgcaacctccgcctcccaggctccagcaatcctcctgcctcagcctcccgagtagctgggaccccaagtgtgcgccaccacgcccagctaatttttgtatttttagtagagatgaggttttgctgtgttacccaggctggtctctaactcctgcgctcaagcgatccttccgccttggtcccccaaagtgctgggattataggcatgaaccactgtgtctggcccttttctgtttgtttgagttggggtctctcagtcacccaggctggagcgcagtggctcaaacatagctcactgcagccttgacctcctggcctcaagcgatcctcctgccttggcctcccaaagtgctgggattaaaggtgtgagccaccttgcccagtacctaactcctctctcgacaccaatttttaaatatttataaatatcgaagaacaggcagacccttcacaggggaaaacttatgtttaattaattttcagggacaccttttattctcacctgggtttctggttctcaaatctaaagtttcctttcaaatgaacttaagaaaagcgaggtgacttaaaagggagctagaacagggcacatgaagaaggggccaaggtggagaatgcggctggggtaccccatcagccatcagcgttggggactcctggcgaagggtggcgtccccgaagccaactaggccccgcctggaaggaagctgcacccactgttccaggaagaagccgaggtttgggaagggatcccacagctccggggctccatcctgctgatgagccccaaactcccctcttcctgggtcctcggagaggagaagcaggaagcggggaaatgagctactgcagctcctgggccctgccgggatccctccgcccctcgcacccatcgactcgctgaacctgacgatggaagagagcaggtgcccatcttgcgggagcttcgggagggccacacctggggccagcgccacagcctgcaggggcctgggggagtggaggcaatgaggagggtgccaccaactcaggccttggagctctgcatcctccaccacccccgggctcaggcgggcgttaactgcatggactgaacggggagggggtcacccctctgtgtccaggagctggggggtcccaggctggagcagccacatcacgtccctcaagggcaaaaaatgcaacatactgggcctcactgggccctccaaagcctccgccctaacgtgtgaggggacaaggcgagaccctcccaacctgcagcattggggcagggccggagcacagggcgagactctgtgggaaccacagaaaatacatctgcaaacattggcaggttcctgctgggaccgggctgggcgtccagggagaggcaacccagagggagcattctcaggtccacacggcctacacaccacagctctggttacccagggaccaatctcacagtggtccgtgccagggctgagggggtgagaggcgacaggggacgagggaagacacctcccaccccaccctccccaccaggccctgctgtaagcccacccagaggcccaggagaatgggggtggacggccttgggagttgcgcttcctcctccaggaagcccccagggcctgaccctctgcctcacacagggaagcattagcatgtccggttcctggggctgtttccggggggctggcagggtggcgtttggggatttccacgcctcagggagcatattccggccagccctgtggccacttcctcacgtagaggggaaggccagtgtgaggcagtgggggcagcaaagcgatgtctctccatgtgggggtgcaagtgcccaagtacagaaccccctttgcccaccactcaaaaccccgacactccagccagggcccacccctgggggattctggagataactgcaggacggcgctttccacccagatcccggaggcaggaaggacacagcttcagaggccccaacccgaggcccccactccccggaaagatgctgatgtccacaaagagacccgtggctctgaagcagcatcgggggcacccgccccaacctcccccaccaaatcctgtcgacagccagcctgggccgcccaaatgcacatcagactagaccctctctccattcacaaccatccagggctccccgctgcccctgcaacgaacacagcgcccctagcccgccccgccggccggtcccaccgcagggcgtccgtacgggctgctctctctgcctggcaaattcctcccctcatgctcccacggccccttcctctcaccctcagggctctgccccgacacgccctctgcggagaccttcactagaggtcccgctttggggcaacctggccctcgctgggtgtgccgtgaagccctgcccatgctccagagtgtgattttcaggccacccccaggaccccacgtctcccctatctgtcccgcccactgctgtgtcatcagcgagggtgacccgctcatccaggtcagcctgggatgtttctgctttgagcactcaaagccgcgggtcccaggaattgcccctcagtcctgggcaaaccacaatggccggtcaccctggtgctgggccctgcatacagcaagcgcctaatacctgcttaaatgaaagtcgtcgaggctcacaaggtgggtgggatccagtgagagccgggatcccgcaccacgccctctccagagcctcagtttcccccttatggattgactggagaaacggatgctcgagatccccacccacacacaggcccagctccaaccctgcgcctaaaaacaagccccacccagcccccagacccaggctccaggcgcgggagggacgaggggacgaggggctcaggggctcgggctcccaaggcaggtcacacgggcaacggcagctgatttcaggggtcttcaggctcgctgcccccgacccggcctgtgtggccctttccccattgtctccctcctttgctgccccagcctccctcgcccgcacactgtcttcaacagacccttgatctcctcactccacgagcgctggcaggaaggcggggtcctacctgaacctccgaactgcgccccggccagggaggcgggccggcccttcccgttggtgacaggcagcgggaacatctgcagggaggggaggggagacgtgagcggggcgggtggcaaaccaaaccctacagtcccgggttcaaacccaagctgggagcagagctggggacacccgggaacctgagactgcgctccatctaggcccggcccgtcctgctccgccccatcacagaccagaagactctgaggactcgcgtgccctcaagtgacgctgcaccctggacacccacgcccagagtgagaaaactccagacgatgaccccgctgtaccgccaggcagagtccctgccgctgaaaactcgctgttccccctgcctttgctctggggggaggggtatcccattaggcgaaggatacaacttatcagctcttgacagtgatacaaagttgtctttacgtttcagctctgaaaagtgagaggtttacactcaacaggtggacatgtggagagtccccggatgcctgagccctggctgactcctcgtttcctgtgtgtgcactggccccgcatggcaggccctggagcagggggtccctggagcggggggtagggcccagtgtccccctaccagggctgggtatgggtttgcttggcaaaaggggaagccgaggctcagacaggcagcaggtcgaggaagacacgggatggagccccgggcccggcaggaagctggaggggctggggagaggctgcaccccacagctgatccagctcctgggtgctaggggtgtgggactgccaccctccctcccgcccggctcacccgtacccagaacactaagtccctaaagattaacgggctcagcggcattaaccggaaaagccaacggcaacaaacccttttgccacagaaaaaaacacaacaagcctccgccctgccccaaggggctgcgttttaaggctcccatcggggcttaagtgatcaaagtggctggaatcagagccaggggctttctgaggagcagccaagatccccaacaccttccccagccagccaggaggcgaaggcacagcgcctgtggccacgatccacaggtccaaaggggacccaggaagcggggttgtcccccactccctggtcctgcagaaggggaaacggaggccgcattctcacctggccctggagaggaagaacggtcttgcgggtaggggtggcacccgcgctgaaggcagtgttcgccctggaccacaccccctcccgcaggctccggtgcacccagcctcccctggacccagacctccaagggccaacctctcatttgggaaacaaaggcctgctgtgggggacagccaactgcatttctatctgctttgtcccctaggacaccagggctgcaccaacgtgccacaggtcacatgggtaccgggctgtgtcctgtgggctctgcaggcctcatgagcagcccagaacagcccccgcaccccttggagcatcagtttcctcttctgagaaatggaccgagggctctggctgtgtgggacgtggtgaaacccaaaagcccatgggagtctcgcacgcggcagggcctggggagctcgcttccaacagcctcggtcctagggactcgctcccccttcattcctgaagcccctgactcaggcccagggactgcctgggacccaggcagggcatgtcagcccaggccagtgctggcgggtccttcgttcccgaccaaagctagcctgggtcagggcaggacaaaggcgcgctgggaacagcctgggttagcgttctccctcgtatttatttggagttccctgttctctcactttatacgcatctggtccagggaagtaagtgcttcccctaggacccagcctcggcaggggcagaaggcaggcatgcaggaacagagtggggatgcgggcagtcacaggggctgcctctgcctccccgtcctggccagggaggtggaactccacctctgggtaaagcccgaggggggacgcccggagaggacgggcacctcgccgctcccagcctgtttcctcatctgggaacggctccgacccgggatggggagacgtgctgagtggcttgaggtgaggagtcaggtcctggggctgaacctgtgccccctccccccaaacgctggtctgttccagcccagcggtctgtgacttgtcagtttaacaaaaaacaacccaactgcacctcgggttactcagccagggaagcaaaaataaaacggggcttaaaaataccagcatggcccttccggagccttggcccctccggcccttgggctgtttttttccgcagggtggccggtgttgtttcagtttggggacttttgtttttgacagacctcagtggcctgtgcctcataggcgggagggttaaattcagactgaaagtgccctcccccaacctgtttcaaccccaaacgctgccactgggcatggggggggggggggagcagaatttaaggacatctgtagacaggccagaagaaacaaaccaaggtccctgggcttctccaggaacccataacacatggccccactgtaccagcaggcaaaccgaggccccgggcctttacagcacccgtcagcggccggtaccccagggggctccggcattccagcctcactgcacctgcctgaactgtgtgacttctgaggaccagcaccctctgagcctccgttcacccaggtggagaatgggccgtacagggacagatccaaccacctaagactctgaagaagccgccccgccctccccaccgggcctgcctgctccgcagtgataaccgtggcagtcacaatggtggcgctgctgtctgctcggtggcccatgaattcccactcaatcccaatccagcctcctcctggcccaagctcggcttctggcagcttaacttcagcacccacgtgtgactaattaaccacacagtcagtttcatgcccgcatcctctgcccaccaggggagtcccgtatggggcaggttgtgtctgccctgttcacggagggtggtccgctcagcactgggcaccccctcctttacttctttgaggaaggatcttactctatcgcccaggaaggagtgcagtggcgcaatcacagctcactgcagcctcaacctccagggctcaagtgattctccttgcctcagcctcccaagtagctgggaccacaggcatctaccaccactcctagctaattttttgagttttgttttgtctttttgagaaatggggcctcactatgtttcctgggctggacttggaactcctggcctcaagcgatcctcccgcctcagcctcccaaagtgctggaatgacaggtgggaaccactgtgcccagcccccctcccatttactgaaacagggtctccagggtctcactgtcaaccagactggagtgcagtgatcttttacttacttttaatttttgtatctacaatgaggtaagcgaccctgatcaggcccattttacagatcagaagatcaaggccgcattttgcttacccagccaagctgggggcccaggaccatgcccctgaggactcagtttccccatctgtaaagcagtaggctgtagaatgctgcgtccgggcaaaagccccatagcacacgtgctgccgtgcgctgtcagcctcctgccagagagcggcccactcccccagccccaccggggcctcccatccaaacagctgaggctccatcgctgaagtattcagcaaacactctcccctgaaaaccttcccgtgaactgtggaggcaaaggggtgtcgggggctgggcgggggtcctggctcaccatgctgaagtccaggaggtcactgagctccttgtctgtgcccacaggcgccatcctctgcggctggttcattctcctggggccagggcgggcacctcaggcctggaaaccctgcttggtggatgtggggacagatggacagggagaaacagggaggggagaagagttgtgagtggtcaaagcacagagtgctaaaagccacctaaaaaaccctcaaccgccctggggtctgagttccagcagagccctgggggcacggggagccctgggagcaggcgcagggaagctggaattccagagtctaggtccctgcagagtcctccccagagaccacagggagtctgaaaaatggggggagggtgtgcaaatataaactccctaactcccccagggaacaccagggcatcaagttgccaagtttaaactgcacgcagggcagccagaacctctcctttctccaactctctcatttccaaccaaccccgggcttcctctgaggccccctacccccgggaaagggaggaacagcccgatcctaccccgccccgagggaaatttggtgattcccccctcccccagcagatggcacagcccgttgaagaccaggtcgcccccaaattcaacatgaaggaaatccacaagtcagaaaaccacgaaactcttttacaagcttcaagacttaaagtgccgggggtgggggggacgcgcatcctatgcagggaccagcaaagctttcctccaccctcaatctccctccccccaagaaaaccccaacagtattcaggaaagaaaaaaaaaacagccctagattgctttactgtcgcgatgtatccgggaattatttttaagcaaaactttgacaacatcccttgcctgccctccatgagcggggagagcgtctcaagaccagggtgctcccgcgtggtcccagggggctccattctaagatgggggatgggggatccacctgccaagacccattccacccccagaaaaaggtacagagaaaaatttccattccaaagaaatgcactccaggcccctccagtctcgactttccccaggggtccccaggtggggacgggggcagcccgggagacacctccgaggctgggggtggggaggagcctccgaggtcgagggagacccaacttcagaagcagagaaatcccctctttgtctgccaactggaggccgggtgtgaagcgggcgccccagcgcagcccctcccccgctcagtttttttcttttttggagggcgtgtgaaactgactttttttgaggactacgaaaccgcacttttttgtggggtagctgaaaccgattttaagacagacttagttgggggggtggcgagctaaaacgggcattctacgggagctggaagacttctggggcgtcccaaggactttgagagacttggagaatgtttgaagccactttgcacggcgccgaaggcggggggcgcgctggaacgcctttttcccggggggaggcggcccgggaagccggacccccctccccccgcagccggtgcaggcggtgcggcccgggagcctttgaagctcgcagcgcggccgccgcctcgccccgcattaacgcggagcagatgttacccgcgcgcccccccccggcccgcccggccccgaccagcgcctgcagcgcgcggcaccttccccgcgcagacaaaaggacgtccctcccgcgcgctccccaccccaaactccggcgcccgggccgggcccccctctacccgagaaagggggcgccccggggtccccgtgcgcccgggctgggggggacggtcctcgcgcctaagttgcacagcccgtccggcgccccccgcgcccccgcccggggctgcttaaagtttcccgaagtgcccggcccgacgggggcgacgcgggcctggcgagctccgggctcctccacgtcgccgcccccccggcgccgcgcgaagttggagaacaatgactcccgggccgcggggcgccccccgacaccgcccccgccccaacttcctccgcgcccccccccaacaagcgcgcgcggggcgggccggggttccctgggcacaaagcacgggggtaccgggcgcgccccccgccccccgccgggctcacctgctgggcgcggccgggcacgcggcgcgtgggggggggcggcggcatgaagcgggggggcccccccccggacaaaggtgcgtcgcggccgggcccccgagggtcgcgcgtgggcggcggcggcggcgcgcgtggcccgggcccctcccacccccgcgtggcccgtcccgcggggcccgtgcgcgcggccggccggggcgcccctggggcagcggcgtgcgcggtgcccgcggtgcccgccgccgcgtcggctccggcccgctacgcccgcagccgccgccgctgcctcatcttcctgcggcgggagacatgttccgccccccgcccgcgccgccccgccccgccccgtgcaggccccgcccctgccccgcccccgagtgccccgcccggcggcccacgcggatccctccgccacctccgggcggctcgggcccgaacgccctagctcggcctctcgagcaccctcgtgaggaccccgaatcccgtgaggtccagagcctgggagcggggacgcgcagaggaggcggtcgggccacggcgcggggagaaatcacggactatccccgtccgcggaagcacacacgagctgtgcgcttagtccatgacgcaagcgagtaaggcccgtgagattgaaagctaaggcagagcagtctggtcaatcggaagccgcgaaagtctgatgggcggggatcctagccattcgtggtgaggccccgcctcctttcttctcggccccgcccctcagcagaggcgggactctgcgagcgagaggccgcgagaggcggccggggtgggtcctggagttttgttctcaggttggcgtggccgcccgcgcggagccttctgcttggttatatttgcgttcctcgggccggccccgcgtgctgagtggtgcgagcgggtatcacggccccgagggggctacgtcagacccattttcccggcgggaaaaccgactctggctccggctctgggtcagagagccccgcggggagtctcagcggtgcctttgccgacttgagtctccgtctcggcatctgtgaatttggacctgactttggacagaactcaggccagatctggcttcctgattcttagtagtccgtgtctacattttagtaaaaagtgaccccgcctaggatcgggcgccgtggctcctgcctgtgatcccagcgctttgaaggaggccgaggcgggaagatcgcttgaggccaggagttcgagaacagcctgaacaacatagtgaaaccccccccacccacacccgtctctaaaaatatttaaaataatttaaaataataatttaaaaagttgaccggacgcggtggcccacgcttgtattcccagcactttgggaggccaaggcgggcagatcacctgaagtcaggagttcgagacctctctggccaacacggtgaaaccccatctctactaaaaatacaaaaattagccgggcatggtggcgggcacctgtagtcctagctactcgggaggctgaggcagcagaatcgctttcacccgaaaggcggaggttgcaatgagccgagagcacgccattgtactccagcctgggcaacaaggacgaaactccgtctcaaaataaataaataaataagtaaaataaaataaaaatacaaaaattagctgggcgtggtggcatacacctataatctcagctactcgggaagctgaggcaggagaatcgcttaaacccaggaggcagaggttgcagtgagcagagatcgcagcactgcactccaggctgggcgacagaacgaggctccgtctcaaaaaaaaaagtaaaataactaaacaaataaatgaaaataacacaatctcccagggctccctggggccccaaagggaaatttacactccactcccagcctgggaagatgccaccatctcgctggcccgcttggctccagccatcctgccctctggatggtccagaacttgctaagctcatccccaccccgggcctctacgtttgctttgtcctctacctgggaggcttttcccacccctatctggagcccctgagtcatcacagttcaatgctgcacctatgccaggccggcggggaggcggggccacaggggccccccaccaaagccacaagcccctcctgctatacacccaaactgggctgtccacagtccgaccctccgtgcccagagagttccacgtgccgcaggtctggggagagggctgtgggtcccagggtctgtgctgcaaatccctcatccctctccacctcactgtgacctcaggcaagttcgtgctactctccgggcctcggtttctccatctggacagtggaaggggggagtctggcacacagtaggtgctcacagctgatgcctgccttcctcagccgccccccacccccgcagaggcctctccggagccagggtctccaagcagctccaatcccaccccagcctcctcagcccccggcccttccttgtggcccagccctgaccccatgggtctgagggtgtctgtggccgggtctggctctccccattccagtgtagggagctcactgtgggccactccccacccacactcagggtccaagccatagtgtggcagccggagtcctcccgaggagcccttcagtttcacccacggaagggaagcaaccatccaatcacggacttcttcttcttcttcttcttcttcttcttcttcttattattattattattattttgagaaagagtctcgctctgttgcccaggctggagtgcagtggtgagatcacagctcactgcagccttgacctcctgggctcaaacgatcctcccgcctcagtttcccgagtagctgggaccacaggcacgcgccaccacacccagctaattttgtattttttgtagagacggggttctccctatgttgcccaggctggtcttgaactcctaggcacaagtgatcctcccgccttggcttcccagagtgctgggattacaggcgtgtgccactgcgccgtacaagactattcaattatcgggcactgacagcgaacggggccttgtgccgcgcatcgtagcactgtggacagtgatggactcagtccctgctgtcccggcaggatgacccatgagggaccccttgtctagtcctgaatgtggctctttcctgtgaggtcctcctgcctgtgtggttccacgtatcgtacagatgaggaaactgagactaggggtctcctccctgggccccagggcaccctggggctcgcgcctgccaggaggttccgctggtaaccacaagccaccattgttttccccaaggaggtcagtcctggggctgagtcactgggtggagcagcccgtgggggccccccacttggccaccacctctgcccagccccgaggcctgggtgctccctccagggccctggtacggggacaggcagcaagctatcctcctgactgtggcctttgttttgctctggggccgggcaggaggaggagcagggcctctgcacctgccgcctgttccctccacacctactgtgtgcgcccccgccaacatgaaccacgtatgtcagaaaaactgaggccaaggacaacttcccactagggagacacagaagcgaggggggcgaggggcggcgatggcgaggtttccagagacagacgcagtaggtgtgcaggccacagctgtccgcagagagactgggcttggattaggacttcggggccaccctccagatttctgtttccatttgtccctaaagtgggcacctttgacttctcccagggtatgaacacactcccccaacccccagcgccctccagcaggggcggagaagggagtggcggcccagcacttatcacccacgtcaggccctgggacaaacctcgctccggcgtccactgagcacgggcagctggggcgatcggtgtcgcctcccaaagtgggggcttcctgctcgagctcagacctccagtgaggggcctgatcccaacacgaccagatcaggaccaccccacagagccctgggctgggactcggccagggtagggcccattcccttattctccacaacttcgtttttattttattttagcagagatggggtgaggtggaaggatcgcttgagcccaggagtttgagaccagactggacaacacagcaagaccccatctcttaaaaaaaaatttttttttttagatgaaatctcactctgtcgtccaggctggagggcagtggtgccagctcagctcactacaacctccacctcctggggtcaagcgattctcctgcctcagcctcctgagtagctgggattataggtgcccactgccacgcctggctaatttttgtatttttttatagagacggggtttcaccctgtcgcccaggctggtctagaactcctggcctcaagcgatcttcctgccttggcctacccaaagtgatgggcttaccagcatgagccaccacacccggccccattcttcctgccttctgggaggaggcgtctccaggcttgctggttggacctgggcagggaagcctcctgagattgggagtgctaggggcttatgattgttctcccctagcggagggaggagattctggtgtgaaatggagcagtggggacacactccagttcctggggtctgatcacaagggttcctgactcctcgggcacttccagctatgaggacaccaaggaagggaagaggcttgtcggtgatcagacccctacccctccacccagacttatgggagccagagggccaggagagctgggcaggaggctctgaggttgacgggaatgggaacacagcctcacacctcctgctgtagggcattcaggggaagaaggaccatctcccacagggagtgggtcccctggggcagtgactcttgggctatgacctcaagatgcatgcggtcgacaggcagagagcggataccatgccaggcaggggaagctgagggacaaaggtactgaggtgggagggggtgtggggtgttcaaggaacggggcctgtgaggctggagcccagagaagaccagagaagaggagccaagatcagagagaggggcagggcctcctatgccacagggaggaattgggtcttcatggtgagaggactagggaaccatggtgggagtttgagcaagagacggacgtgatcacagggaccatgagttggggtggatctggggtacatttggaggataactgagggctctcccagggggtgggtatgaggggttagcagcctgcctactaggtgtggggttagggacctgggcctgtgaatggtggtatcgttctctgagtggggccagcgtgggtcaagggagaggcgtgaagggggaacaggaggctcatgtcccagggtggtgtccaggccccatgagacaaggcgggtcatggccaggaggggctgcgtgagagggggcaccagtgaagaaggcacagtccccagtcggggggagcccagctctggatgcagcctggcctccccgagccctccttctgtccgagccccccacgcagcccctctgcacctgccgggtgcccgtccaccccagggccagggccaactgccgaggatggtcccaccccctcttggccaggcgcccacagctcctgactcaggggcccccgggggcctgtcctgccacattccggggccgcccgtgcaaacacagggcgcctgcccatcaccccccatggggcattgtttggcccagttaccccgaggcgggggcagggcaggggacagggagcccagccagattctcagttcccgccacccatgcacctgcccacaggcagccctgctgacctgcacccgccttgacatggggggacggcgcctctgcagtgtaccctgggcacaatgggggcatctcccttcttcccgggggtcttcacctcccctgaactttgctcaaggcacagaggacgtcatcccattgttcagatggggaaaccgaggcaggactcaagtggcctcatgcctgaagctgagccaggctcccatccccggcccacctgtcctgtcccccaccgaccccacctcaccccgccaggctccttcacctgcacctggtgccttccagaaacgggggaggccactccaggctgtcagccctctggcacaaaggctgggaggtcagaagccatccagggacgccttgccacgctaagaaggttgggtttcattcgcgggtttggaggagccgagggggccacgtggtctcactgggggttgggaagggcatctgggagaccgaggtggaggccggtgacgtggctgtggagtgggatgcccaaggcaacaggaggggtggaaagagatgcctgttagacgggaaactgggggggcgcccctggggaaagacgacaaggatcctaggagggcggggagcacaggtgcccccaaccccaaggggtgagaactagactcaggaggagactcagggcttgggggctgcagggatggctgcctggagctgagcctgcaaagctggaacagggaggaagggtaactgagcagagggaacagcagaggcaaaagctacgagacgaggaaatgcaagttgttccctgggtttgggccgagggccagggggcgggggcgggtggcactgatggatgtgccacccacccccatccgggccatcctgtctggatccgggaccctgccctcgcccctccctccctccgtcagaccggccctgcactccacagacattgtatgtcttgctgctgcccagagcccgaaagtccctgcccacctccccgtctccgccactcctggttgtccctccaagcgcctgttggtttctgggcctgtttcctggctgtgtcctctcctggaacaactttcctctctttgtacctggctgtcttctcttcctcatccttccaccctcagcttgggggccacctcctccggggagccttccttgctttgtttgtttgtttgtttgtttgtttgtttgtttgtttgtttccagagacagagtttcgctcttgttgcccaggctggagtgcaatggtgccatcttggctcactgcaatctttgccccctgggttcaagcaattttcctgcctcagtctcctgagaagctggaattacaggtgcctgccaccacgcccagctaattttttgtgtttttattagagacggggtttcaccatgttggccaggctggtcttgaacttctctgacctcaggtgatccaccccccttggcctcccaaagttctgggattccaggtgtgggccactgtgcccggccttggtcggcagttttctaacagctgggggtggctgcgtgtgagacaggagagggtgagcaggaggtgctgggatcagaagaggctcagcaaaggttggccccacacccagcccccttgtccttttcaggcatagagaagatacaaaatccagaaccatgcaaggagaaaattcttcaaatttgaccacacaggccagacacggcagctcatgtctgtattcccagcactttgggaggccaaggcggcgggatcacttgaggccaggaggttgaggccaaccttggcaacatagcgagaccaccatctctacaaaaaaaatacaaaaattaggccgggcctggtggcatgtgcctgtagtcccggctactctggaggctgaggcaggaggatcacctgagtctggggaggttgaggctgcattgagccatggttgtgtgactgcactccagcctgggcaacagaacgagactcagactcaaaaaaaaaaatgttttttaggctgggtatgatggctcacgcctgttatcctagcgctttgggaggccgaggtgggcagatcacttgagatcaggagttcgagatcagcctggccaacatgatgaaatccactctgtactaaaaatacaaaaattagccgagcacagaggcaggcgcctgtaatccgagctacttggaggctgaggcaggagaattacttgaacctggaaggaagaggttgcagtgagccgagatcatgccactgcattccagcctgggacacaagaatgagactctgactcaaaaaaaaaaaaaaaaaagtttttcgactacataaaaattaaacacttttgtgtggtcacagactcacaatgaagttagatgagatgagaaagctagggagaaactatttgcaacatcataacagacaaagggtttgggctcttcgtatacaaagagttccaacaaatcaataaggaaaaaactcaaaaaaaaaaagaaaccatgcaaagaaatgagtgattaattcatacaggaaaaaattaaaatggccactggatacacagacgaataaaaaacctaaagtcactcttggtgaaaaagatacaaatgggccgggcgc[208 bp omitted]gcttgcagtgagccgagatggcgccactgcactccagcctgggtgacagagcaagactctgtctcaaaaaaaaaaaaaaaaaaccaaactaataaatctaataaaaatggtggcatgaccactgctcacccatgccaaggccgttttttaaaaacaagacaaaacgtgacggcatgagcagggctgtgcattagaacgtggtttgtggcacagaacacttgatttgaaaactgcccaagtgtccaacaacaagggctgtagaagaagattctgtcatggctgcactaggaacccgactgttgaccgtccagcaagtcaggttcccgtgcctgcttggagccaagagacgcctgaggccgcctctctgggggaatgaaatacaagttaaagacccgccatgccacttttggttgaagcttttgtaaaggaaaaaagcatattgaaaaagtgcaggaggaaatgccccaagggcttggtggttactctgggggtgggggacactttcagttcttactttatcttttttttttttttttttttcactctgtcgcccaggctggagtgcggtggcgcgatctcggctcactgcaagctccgcctcccgggttcacgccattctcctgcctcagcctcccgagtggctgggactacaggtgcccgccaccatgcccggctaattttttgtatttttagtacagacggggtttcaccgagttagccaggatggtctccatctgctgacctcgtgatccacccgccttggcctcctaaagtgctgggattacaggcgtgagccactgcgcccggcccttactttatcttttgaagaggcaggattagcttgagagtttacattggacattattttctcttttccttggttgaaaatgtttgttttgggggccgggagtggtggttcacgcctgtaatcccagcccttcgggaggtcaaagtgggaggattgcttgagtccaggagttcgagaccagcctgggcaacatagcaataccccatctctaccataaattaataaataaaattagccaggcatggtggtgtgcaactgtagtcccagctactagggaggctgaagtgggaggatcccttgagtccaggagttggaggctgcagtgagctatgattgtgccactgcactccagcctgggggatagaccgagaccttgcctcttaaaaaaaatttcattttgacaatatgcataaggccacatgcgtgaagctcagttggaatgtcacttgcaacatcataagaggcaaaggatttgggttcttcatatacaaagagttccaacaaatcaataagaaaaaactcaaaaagaaaaccatgtaaagaaatgaatgattaattcatacaagaagaaatgcaaatggccactggatacaaggccacagaatatttggaaggtgaggctgacaggagagctgctgtcctggagacattgaataaatactgccaggggccgggcacggtggctcacacctgtcatcccagcactttgggaggacaaggtgggccgatcatttcaggccaggagtttgagatcagcctggccagcatggcgaaacccccctctgctaaaaatacaaaaattagccaggcatggtggtgtgggcacctgtagtctcagctactcaggaagctgaggtgggagaatcgtttgaacccaggaggcagaggctgcagtgagctgagattgtgccacagcactctagcctgtgtgacagagtgagattccctctcaaaaaaaaaaaaaaaaaaaaaagactgccagcatccacttcatcttcatgttctaagatgatggtttatctttgtgtgtattttatgttttttagttttaattttttttttttaagagatggggtctcagctgggcgtggtggctcacgcctgtaatcacagcactttgggaggccgaggcaggtggatcataaggtcaagagatcgagagcatcttcgccaacatggtgaaacctcgtctctactaaaaatacaaaaaattagccgggcatggtggcgggcgcctgtagtcctagctactcgggaggctgaggcaggagaatcgcttgaacccgggaggtggaggttgcagtgagctgagatcgcgccattgcactccagcctgggtgacagaatgagactccatctcaaaaaaaaaaaaaaaaaattagctgggcgtggtgggcgggggtggggggcgcctgtaatcccagttactcaggaggctgaggtagcagaatcgcttgaaactggaaggcagaggttgcagt[131 bp omitted]atggctcactgtagcctcaaactcctgggatcaagccatcctccatccttagcctcccaagtagctgggactgcaggcatgtaccaccacacctggctaatttttctttattttgtttgtagagacgggatcttgctatgttgcccaggctggtctccaacctctggactcaagccatcctctcattttggccttccaaagtgttgggattacaggcatgagccaccatgcccggacccccgccaccccgctttttttttttttgagacggagttttgctcttgttgcccaggctggagtgcaatggcgtgatctcagctcactgcaacctccacctcccgggttcaatcgattctcctgcctcagcctccctggtagctgagattgcaggcgcccaccaccacgcccagctaattttgtatttttagtagagacggggtttctccatgttggtcaggctggtctcgaactcccaacctcaggtgatcagccccacctcggcctccgaaagtgctgggattacaggcatgagccactgtgccctggtcccggccgctttttaaaattaaagaatgtttagtttttcacctcaccatagatgctgcatgactgagattgcagaaccacagaacgggcgtgggtgggcttccaccggggcaccccctcctcctgcaggatccgcactgcccgggcatttccctgggggtggggaggcctcttgctgtcccagggttccctgggggaaacccctggtgtcctggggaggccccaccaggttgatcgtgagcttgagctcagggcaaggagcactgctcagcgagtccactgtggttgtggtcacacgatggtgtgagctctcatctgtcaaaggagtttaacaagagcacccaccagggtgagttcaatctgtccatcgaacgcaacaggcccaggccccggaggcttttagggcccatgaaaatgtctgtcttccttcctccctccctccttccctccctctctccctcccttcctcccttccttcttttctttctctctttctctctctttctttctcttctttcccttccctccctcccctcccccctcccctcccctccctccctctctctctgtctctttttctttctttctttctttcttcctttgttgcagagtcttgctctgttacccaggctgcagtgtgatggcacaatctcggctcgctgcaaactctgcctcccaggttcaagcaattcttctgcctcagcttcccaagtagctgagattacaggtgcccactaccatgcctggctaatttttgtatttttactagagatggggtttcaccatgttggtcaggctggtctcaaacccctgacctcaggtgatccacctgcttcagcctctcaaagtgctgggattacaggcatgaaccaccatatctggccaaaaatgttttaatttcttttaaaatcagggccgggcactgtgtggctcacacctgtaatcctaacactttgggaggctgaggcgggaagatcgcttgagcccaggagtttgagaccagcctgggcaatacagcgagacctcgtctcaaaaaaaaacaaaaacagaaacaaaaaaacaaaaagccaggcgtggtggcaggcacctgtattccagctactggagaggctcagacaggaggatggtttgagcccaagaggttgaggctgcagtgacccaagtttgtgtcactgcactgcaggatgggagacagagtgacaccctgtctcaggaagaaaaaaaaatttaatcagaagaaaaatgatgaataataattgttttccgatgaacaataataataacgaattaaggccgggcacagtggctctcacacctgtaatcccagcgctttgggaggc[134 bp omitted]gaggcaggagaatcgcttgaacctgggaggcagaagttgcagtgagccgagatcgtgccactgcactccagcctaggtgacagagtgagactccgtctcaaataataataataataaattaataataacaattctagtctcaattttacttttttttttcaatagaggaaaggactcaggatggcaaaagtgacttggtcccagacagccctacagggcagtcctgcccgggaaggagcaggtgctctctgctgctgaggcccctagcagaggctgggcctctgggtctcccagcaggtggcaggggtgtgagaaggggaggcccctttccagaggccagggacggccccaagggctgcccgggagatactgggtcatgtgaccccccggagccaccccctgaagcttggtctcaggttttctatttgcttcagactcttgttagtcccccccagctcctgctccatcaggcctggcctccttatcaccccggctgtctgggtgggggcatggccccctcgtaacctcagctacctgcagggcagggcagaaccccgggtctccggccggtccgtggccggtatgtacctcacgcatacagtctgcacactgggcagagacagacaagaaattcaccagccactcctcactcctgtcctgaccctgaacctgaccctgtcagggagacctgggctgagacgggatacagaactgggtacaggagcctgcagctagggctgagtcagggcaggcccaggggcacgggaggaatccaggggacacagcaaactggagaggggcgggaagcatgtgccctgcacctggccgggccctacttctcccttccttctcttcctcctcttcctcctcttttttttttttttttttttttgagaaggagtttcactcttgttgcccaggctggagtgcaatggcgtgatttcagctcaccgcagcctctgcctcccgggttcaagcaattctcctgcctcagtctcccgagcagctgggattacaggcacctgccaccacgcccggctaattttgtatttttagtagagacggggtttctccat[243 bp omitted]cctcagc[218 bp omitted]ttgctgtgttgcccaggctggtctcaaactcctggcctcaaggaatcctccacttcagtctcccacagcactgggatcccaggtgggaacg[133 bp omitted]ctcctgcctcagcctcccgagtagctgggactacaggcgcctgacac[182 bp omitted]ccctccatgtccggcctcccgagccccctctgcccacctccctccagctgcgctggccacctcctcgctgctgcttggacaccgttttctccctgtgacctcagggtctgtgcccaggatgtccctcggccgggagccgttcctccccactctcaggcccctttgccggtgtatcatcagtttatcgttcctcccactctcaggcccctgtttctcccccttgcgcctgtggggcttgcctggctctgtaaggggagccccgggcccagcctggccgccccacacctccagcatccatctggggcctgacacacagtaggtgctccataaatgcacaggctaagttggggggttccccatcttacaggtgaggaaactgaggctccgaagagggcggcctgacaggcatctgggagccccggcccaggcgaaggtatttcctcctggcccagggcgccgtggggtcccggggcagctggtggggccgccaaagggtggccgtgtgtgtggcggtggcagctggggctctggcagtgggggagggtgggcgggaggcagcagctggtggctggccccaggccagctggagcctgtgcagagggagggcgctgggtcggctcacgctgcctctgggtccccttctgagtccccctcagcctttctcggttggtctccatctctgtctttgtctctctgtctctgtctctttctgtctgtttctctctgtcttctttctctgtgctctctctgtgtcagcctccctgtctctgtctctttctcttccccatctctgtctgtctttttgtctctgtctctgtttctttctgtctctgcgtatctctttctgtccctctgtctctgtcagtctctctgtgtctgtgtgtgtctccatctctctctgtctccatctctctcgttgtctctctgtttctctttatctctttctgtctctctctgcctgtctctctgcctctctgtctctctgtttctctgcctgtctctctctctgcctctctgtatctctatctctctgtctctttgtctgtttctgttcttctctgtctccttctctgcttctctgtctccttctctttctgttcctatctcttgtctttttctctgtctctctctgcctctctgtctccctctgtctctgcctctctctccttccccttcacactggggactcccctgactggcccggacaggggctggttacactgctgcaccctctcttccagacctcccgctccaccccactccctgctgcctgcacccctgcgtcagccagcacctctgtgctggcatgaaggtctctacccaccgggaggagcccaggaccctctcacgggctggggaccctgtgcgcatcgctccccctgtgagcctgcatttccccacatgcagggtgtttgcagagccctctcagagcggtgctctggggaaccacagggcagaggtctcagcccgtcggggctcccagccagatggggaaggagaatttcgaaggaatcgccttacaggcatttgaaactctgcaggcagaggccaggggaatcccgggtggaggagcaggcagggtgagggccctgagagtccctccccgggttaggagcaggcagggtgagggccctgagagtccctccccgggccacccccagccacactcccccgtcacacagggaacctggcccagttgcccgtacccactggtcctggggagggcagctgggaggggctgtgtgtgcactaggggggcggagctgggactccccccaaggaccctcccttccgggatctacacccctgatcccccctcgccagcacatccacccaccaccctcgcagacaatagaattcatcactgtagaaacatcctctggggctggggcttaatcagttcctgatttgcatttttgcatattaatgacagcagagctgctaattttggcacatgattttaaaggtgcagtagctctgaaactacggaggcggtgagggggtgaggaccggggccttcctcacctggcctggggggtgctggccctcaggttacaggttacagggtctctgccctgggagcggcccctgcctctgggagctgcagggacccttggggattatggggtccctgcctctggggctcacaggaatcacagagtctctgccactctatctttctttccttcccttccctccctcccctccctcctctctctctctctctctctctctctctctctctctctctcgctctctctctctcgctctctctttcctttctttccttcccttccttccctcccttccctccctcccctctctctctttcctttctttcctttccttcccttccttccctccctcccctccctcccctctctctcctctctctcctctctctctctctctctttctttcctttctttcctttccttcctttccttccctccctcccctctctcctctctctctctctcgctctctctctctttcctttccttcctttccttccctccctcccctctctctctctctctttcctttcctttccttcctttcctccccttccttccctccctcccctctctctctctctctttcctttccttcccttccttcccttccttccctcccttccctcgcttctctctctctctctccttcccttccttcccttccctccctcccccttctctctctctctttcttttcttcccttccttccctccctcccctctctctctctttcctttccttcctttccttcccttccttccctcccttcccccccctttcctttccttcctttccttctcttccttcccttccttccctcccttccctccctcccctctctctctctctttcgttcctttccttcccttccttccctcccttccctccctcgtctctctctctctctctctctctttctttctttctttcgctcttgttgcccaagctggagtgcagtggcacaatcttggctcactgcaacctccgcctcccgggttcaagtgattctcctgcctcagcctcccgagtagctgggattacaggtgtgcgccactatgcccagctaatttttgtttgtttgttttttga[134 bp omitted]tatgcctggctaattttttgaatttttttttagtagagacggagtttcaccttgttagccaggatggtctcgaactcctgacctcaggcgatccgcctgcctcggcctcccaaagtgctgggattataggtgtgagccaccgcgcccggcccatgcccggctaactttttgtatttttagtagtttcaccatgttggcaaggctggtctcgaactcccgacctcaggagatccgcccacctcggcctcccaaaatgctgggattacaggcatgagccaccgcgcccggcccactctttttcttctcttttgaggcaggatcttgctctgttacccaagctggagtgcggtggtgcaatcatagctcactgcagcctccacctcctggctcaagtgatcctcccacctcccacgtggctcggaccacaggcgtgtaccaccacactagcctaattatttaaaattttgagtttgggtgccgtggctcacgcctgtaatcccagcacttcgggaggcagaggctggtgggtcacttgagatcaggagttggagaccagcctgaccaacataggggaaccccttctctactaaaaatacaaaaattagctgggcatggtggcacgtgcgtgtaatcccagctactcgggaggctgaggcagggagaatcgcttgaacccaggaagcagaggttgcagtgagccaagatcgctactgcactccagtctgggcgacagagtgaaactccgtctcaaaaataaataaataaatacatttttgtaggacaggggtcttgctatgtttctcaggctggtctcgaactcctgggcttaaatgagccttctgcctcagccacctaaagtgctgggattacaagtgtgagccatcacgccctgtctttgccactcttgcatttgggcatcaacgctggcattggccaggggaactgggattctggaattttctccaattggctccatcctgagaatcccatatttggaaagctgtgaattcaagttccgagtatcttaaaacctttggattttacccatcgaggctgaggatagtaagaatatttaccggccaagaatatcactttaaaaaaaaatcaaaacaaacctttgtattctctgtcctaggtagaccctaaatcctgcccttgtcctcacctcctgcgctcagatcggaaacctgggacctttgcctccaaaccccaccccacaatcccgcccaggctcaggactcagttcccttcgcccccaccgcgccctcccccggccctctgcacctgccgcgtcccgtacccggcctgctcttcttcaccattggtgccttttccttcaaccccacctccccagggaagccctcctggtgacttcaccacgcctgtgtgttcagttattctccctctccctgggaggtggggaaaccgaggcatagagcggcgaggctggtgctcacggccccccggggtcctccccagacccctcccctccctgtggtccgggggtgcatggggtggggcgcgggggcctcgctggtcctggggttcagtcgggcgcgcgtgctgccacctggtggccaatggggcaaggccgcgggtcctccccgggcgtcggggcccccaccccacggagcccaccctgcgctgggggaggtgggctcaggaaagccgcggcccccgctcgggacgccaggggtgggggacacggagcttcgccagactcccccaaactcgggcgcgtcatgggaagaatggagggagctggatgatgggggtcctgcgggctgccttccctgggtcttctggtgttgtccccgtcccgtccccttcttacccctgcgtgacgcccagaccgagggaggtgggactgggacccccttccagggacagagctgcagcgggtctggcgtccaccagggcgcgcccgcagcccagaaacccgcgggcgctccccacgtgcgcgctcacacgtgcatccgcggctaccccagtgcctcgcggctcgggctttttttaatttttattttatttttatttttttgagacggagtctcgctctgtcactcaggctggggtgcagtggcgcgatctcggctcacggcaacctccacctccctggttcaaacgattctcctgcctcagcctccagagtagctgggactacaggcacgtgccaccacgcccagctaatttttgtatttttagtagagctagggtttcaccatgttggtcaggctggtccccaactcctgaccttgtcatccgcccacctcggcctcccaaggtgctgggatgacaggcatgagccaccgcgcctggccggctcaggcattttgacccgaggcacacgtggtcctgtgtggttggtgtgtttctgaatgaacagtgttcacgtagattcaggtgtgccacacgtgatgtatacggggcatgcttatgcgtgttctcgcatgctcgtgtgcattctagcatgtgtgctcactcctatacacaggtttgcatgcgtgtgctggcatgtccgtgtgggtgcacacagaggctgtgacatgttcgctcgttgccacgagctcaggtgtgtttgtacatggtcagtcccgtttatacatgtgcacgcatgggcacgtatgtgccaggaaggttcacacatacaccttctcatgtgcggcctgctgtatctgcacatgtgtgtcctggtaaacgcgtgtgtttgcgtgttctggtgtgcttgcgcatgtttgtgtgtgtgcatgtgggcgcactcacagccacagcccatgctggcgtccctgagtgcaatggccccttatggactgggtcctacaggacacccctgagtcaggccccacataccccagggccctcccacagctccactgccccaaaccccctggccctgtgagccgatccctgcagccaaagggtccaggtcgcccccagtcagcctctccctggtctgccccaacccccagctctccactcgatctcccccacttcagtggctgcagcctcctgcacccgcaccctcttcctgctgtggtggcttctgggtccggtccccagtcagccccagctgctgcctgtgcccccaagagatgcagagctcttaggaggcagggccgtgtctggggtccacggctgcaccctgatctctggtatccagccggcacgcggtaaccaggtcagaagcctaaccgtccttcagccgggcccagcagctcccgtcgctatgggaaatccatgctcagctcccacaaacccagcagtcaccagctggcctcagccagaggttcccctgtcacagagcctgccaagcagagaccctcctgacactcactcaccccttcctctccagtggtggggctggatgagcgggccgcctccctcctctttaccgttccctctccacctggcaaactcctattcatcctgtggggccctggaacatgggccccacttctaggatacctaccccagtcctgggggtgaatggaccagaagctaccttggagagcagaccaggtgccagctcccaggctcccagccctcctgggtgaacttgggtggtggcagctgcgtctcatttccaagccaagcctgtagacaggagcccaatggcggttagtcaatggcagaccgccagggaggggtgaatgctggttcccaggctgtgtcaacatagccaaccagctgcccaggaggctctgatgtgaggaccgtacccactgctggtgcctccctccctccctccctccctctctgtctctccctcccctctgtccctccctcctttccttcatccctccctccctctgtccctctgtcactccctggccctggccacccacacagcccccaagggccatctccttggcaacagtggccacaaggtcgtctgctggatcaatctcctctcacccctgcagccccgaccccggacccggaaggtgacaaggaagtggggtcaggcctggcttcccgggagggacccagtgtgtgtaggacagggggggtcctttggctggagcaggggtggcaggactcagatagggtgagccggtccctgttgagagggtcagcagggccaaaggtccggcgagccctgggccacacactgcgtgtgaccctccctgggcctcagtttcccttgaggcacagcctctctgatgtctggactccgggtccagtccaggacagtcctttggagagcccagtgcgtgggagacacagtccctgggctgacggtgagaaaggacaacgctgccctcatcccaatttacacgccccgaagacactggcctcaggccgctgggccaggcagtggtcagggctgggga[197 bp omitted]ctgagg[139 bp omitted]agctcctgggcagtccaccactgctgcttctagaagattccaccattgccatttctggaagcttccatctttgtctctctgggcagctccgcattccagtcaccagggcagaaggaagaaggtgccctgaggtttttccctttggggaacaggtgggcaggctaggcagggagaggaccctccaagcacacgggagaagctggccccccctcctcggtggggcgctggggacacctcctcggggcggcacagcccgggtggggccaccaggcgtcccgcggcaggtcggtgagccggcccgggaggactggcatgctgaagacgtttgtatggattctggggcaggaggggcggcagggtcttggggggccagaggcgggagagggtgggatcgcctgcagaacctagctcaggctgctctcttcctttcccaagcctcagtttccccatccgggcaatgggggaagacgcagatagggaatagatttgcccttggcctccggggacctcgttttccggctgcggcactgcagctcagagaggtcaggctgcctgcctagggccacacagcctggaggtgggggccggccggggggcgcagacgcgcaaagcctgtccccacctcacggccccctccccgccggcccgggcggggctgctggccctttaagagcctcgttttggcgccgcctcggggttatcgatcgcagccttggaaacgcgattagattatcccggctgggaacggcagcctggcgggggccgcgcgggggaagcgcgccgcttcttgtaaacggttccccgaagggcgctgggccaggggcctgggagggggctcgttcccggtggggggggcgtcccggtgcggcgcggcccagcgctcccgggaacgggggatgggtaactggggcccccattttgtgttttgggtttggaaattgaggcgcagagaggggtgcgcctttctgcgaggccgcatacccaggaagacgggtttatttgttcagctgcatttattgagcgcctagtgtgtgccgcgcatgcgcggggcctattaatccgattagcgtttcgcataaaaatagagtcgcggatgatgatgatggtgataatgaatatccgtgctcctgactcgctcctgccgtgccaccaagcctttatgtgcgttgtctcagatcctcaccccaacacttagagtggcagaggccctggtcccattatacagatggggaaactgaggccggagctcaaacaagccagaggggccgaaccgggacaggcgggcccccggctcgctcctgggagcctccctagtagggtcaccgtagaaggaagggaagggatgggttgtggggggagttggggaccagcccctccatccactgtgaccccttctgcatccgccaaggcctctggtaggtgcctgagctgaagcagatgaacccttgagtgtgggaggaaaggatgggccagcggatgggtgggggcaggaggaggcccttccaccaccaacttctgacgcctcagcagaaaggccccgggcccatgagcttgagtcgggggctggtgggcagtggacaggaccagcttcccttccactccgcggtcgtttgctcccacatgtgaccccatgcccacggggggctggagggtgggcaagcacgcattcgttgaacacctgctgtgtgccaggccctgaaccgtccccctgccaattgtggcacagtaggagctggttccaatgcccacccacattcaccctgatgcacccccagagacccagtccagtggtcccacagtcaacgtttgttgattgaccaaatgacagtattttgcaatagcagtaaatacaaaccacttagactggacttcacttgggtctcaatgacccttcctgccccatcgtccctgaaaacctctatccttccatcgttcctaacattatggagcaccgactgtatgccccaactaccttcttcatcctctcagcagcctgtgaggcaggaaatatgactggcctagtctacagagggggaaactgaggatctggggggtggagggccttgtctgaggccgcagagcccagaagatgagattgtaaacccagacccaactgtgtctttttttttttttttctcagacagagtcttggtctgttgcccaggctggagtgcagtggcatgatctcagctctctgcaacctccatctcctgggttcaagcgattctcctgcctcagcctcctgagtagctgggactacaggcacccgcctccacacccggctagtttttgtatttttagtagagagggggggtttcaccatgttggccaggcttgtctcgaactcctgacctcaggtgatctgcccgcctcagcctcccaaagtgctgggatgacaggtgtgagccacccctcccagccaggcccatctgtgtctgaaccttaggttgtttcctaggaaaggggccggggcttgtacttctgaggctctgaatgggaggaaaccgaggcacagagctttcatgaggagacaggaggccaagactcaccctccaggttgcaggcagaaggaggggatgtggctggcttgagctacaaccacacggtaccacctgggacctcttcagtagggaccagctgggcgaggaccccgccatggtggggaggacaggagaggagggagctcaggagaggaatgtcagggaggtcacacttaggggtcgaggcaggtgattccttctgctggagagggttgccagggtgtctcagcctctgggcagggccagagcagggatggggggcccacccgtgtccccccagagtctcccctgcagccccccaatgccggacatccagaagggcgagcctgtgtctctctcctctgtctctctccttctctctctcttcatctctctttttccatctctgccactgtctccctctctatctctctctttccttctctccatctccatctctttctgtctctctccatgtctctgtctcttactctttcttaatctttgcctctttctctccatcactgtctccatctctgtctctctctgtctctattccatctctgccactgtctctccctctctccctttttgtctctctccatcttcatctctctccatctctgtctctctgtctctctctctctccctttgtgtctctctctccatcttcacctctctccatctctgtctctctgtctctctctctctccctttgtgtctctctctccatcttcacctctctccatctctgtctctctgtgtctctctcttccatctctgccactgtctctgtctccctctccctttgtgtctctctctttccatcttttctgtctccctatctccatgtctctgtctcttactctttcttcatctctatctcttcgaccctctctcctcgtcccccagtccctctctctgtctctgtctctctctttgtctctccatctctctccatgctcctatctctgtctctggccctctcctccccctgactccggagccacatctctccccttcccagctccctggccccctccccacccgcctcaggagccctcagctgtggtctctccaagtgcccccactcctgccgggaagggcctcatggggccctggtgggccttggtgctggacaggtagagacttgagaagctcctgggtgccccagctccaccctgtcccctgacccgagcaggccgcatggccttggccagccgctgccctctctgagccctgccctgcccttgaaatctgggagggtcggtgtctggcttggtccccccagcctaggacttcataaaagcccagcacccatcgaaggtggacaccctagagctgggagaagagaataaatgagccaaccaggaccagcccctcaggcctcacctcacttctgccagatccccgcagagaccccccatcttctggggaaactgaggcacaggcagggtacaggtgccggaggagggctaaaggcggctaaaggctcccgcgcccgggcgtccctctcgttgtctgcagggtgtggagatgcctcaggccaggggctggggctgggaccacctcccccatggcatccccccaggtgctcccatgctggttcctggccctctttccagccttgatgaaggcaggcgcaggaaggggctcggcctgcacgtccctgccaggagcatcgtcatgagcgtgaagggggcaggcgcctggtcagggtcacttcccgctggacagatggggaaactgaggccggggtctgtaggaggctttggtcctatccactcctcaacgcacttccctaaagccaactccatgcccgacccagcagtgatccggccaggtcctgtcctgccctccca[132 bp omitted]aaaccccatctctactgaaaatacaaaaaattagccgggcgtggtggcgggtgcctgtagtcccagctactcaggaggctgaggcagaatggtgtgaacccaggaggtggagcttgcagtgagccgagatcatgccagtgcaccccaaaaaaaaaggaggtgcattcaacaaaaggacccctaaatacagcagtatagcccagggtggggccggcaggcagagaagcgaccccccggggcagctgccaagggcccaacacgggctggggtcagggagggcttcctggaggaggggacacttgagctgtggcctgaggtgagcaggagctcagagagtagacagcacttctggtacaggaaggaggaggacagcgccctgaggccggaaccaggctgtggggaagcaagaccggacactggagctggaggctgggccatgcagggtcccgtgggctgcgttgaggacgtgggtctttttctggggtgcactgggagccacaggaggctgttgtgaacagagtcatgtttccttgtttctttttcccttcttttttttttttttagagataggattttgcaaattagccgggcatggtggcgcgtgcctgtaagcccagctactaaggaggctgaggcaggagaatcacttcaacctgggaagtggaggttgcagtgagccgagatcacgccgttgcactccagcctgggcaacagagaaagactcagtctaaaaaaaatttaaaaaaaaaaaaaaaaaagagagagagagatggggtcttcctatgttgcccagactggtcttgaactcctggactcaagtgatcctcccgtcttggcctcccaaagctctgggcactcttgtcacccaggctggagtgcaatggtgcagccttggctcactacatcctctgcctcccaggttcaagcagttctcctgcctcagcctcttgagtagctaggattacaggcatgcgccaccacgcctggctaatttttgtatctttagtagagatgggggtttcaccatgttggtcaggctggtctcgaactcctgacctcaggtgatcctcctgcctcagcctcccaaagtgctgggagtacaggcgtgagccaccgcacccgggcctaaagtcatgttttttaagccaccagccctggtggcttccagggaagggctgttggaggcagatggggaggctggaaggctgggttgaggctgagtcaagtccacgcagatggtctctgccaggcgactgtgtcagagatggagagacagggagagacaggcaaggtttgccttcctgcccagcttctgtgacccagggggcagctggacggctgggcaggggtctggggaccaaggggtgcagggcagtggccgtggccctgccggcccctccacagcagtaattaagggctcccggcgtccccgcggcgtgatgtatgtgtaccttaactaatcatttattaggtcactgatggttcgtcaatattaattcatttatttaaacaactcagctctgtaatgaagatgttgtctgagaggggaggctagttggtggcggggccaggatgcagaaagggggctcagatttgggtcttagggtggcctcaagaaatgtcagctgggcacggtggcacatgcctgtaatcccagcactttgggaggttgaggcgggaggaggacttgagcctaggagtttgagaacagtctgtgcaacattgagaccacatctctacaaaaaaaaaaaaagaaaaatttaaatacaggccaggcgcagtggcttactcctataatcccagcactttgggaggccgaggcgtgtggatcacatgaagccaggagttcaagaccagcctggtcaacatggtgaaaccccatctctactaaaaatacaaaaattagccaggtgtggttggcgtgcacctgtaatcccagctactcgggaggcggaggcaggagaatcacttgaacccaggaggcggaggttgcagcgagctgagatcacaccactgcactccagcctgggtgatagagcgagactctgtctcaaaaattaaaaaaaatatataaaataaattaaaaatacaaaaattttttttagctgggtgtggtagtgtgtgcctgtagtcccagctactggggaggctgagatggaaggatcacttgagcgtggaggttgaggctgcagtgagctatgattgcaccactgcactccagc[132 bp omitted]cgaaaccccatctctactaaaaatacaaaaaattagctgggcagggtggtgggctacttgggaggctgaggcaggagaattgcttgaaccagggaggcggaggttgcagtgagctgagatcgtgccactgcactccagcctgggcaacagagtgggactctgtctaaaaaataaaataaaataaaataaaataaaataataattaaataatcagatgacacccctaccctgctcaagaatagtccatggctccccagtgccctgaggagaaaacccacactcatccgaccctgggtgacctttgcggctccgtcttcactcactctccactcactgtctccctttgcccattgctactgctggaaacttcccagctccttcccgccacatggactctgcccttgctgtgccctcgcctgggagccgccgtcccgcatctcctcccggctccttcactccctggggtctcagcgtcagtgtcatctcccagaagcaccttctccaatctccccagtcccagggcccccagcacctccccgtcacccatgatcctgtttgatttccctccgagatcttcttggtgatgtacgggtttagctgtttatcgtctgtttttcctccatcttcaccttggtctgtcccagagagtagatggcactcagctgctgctgcccctccacagcagacatttctggggccccgtattttggctccttggcccccgttgctggttccctgcaggcgctgggtgcctcctccgggtctccgggttttttgtttcgtgtttgttttgagacggagtctcgctctgtcacccaggctggagtgcagtggcgcgatcttggctcactgtaagctccgcctcccgggttcacaccattctcctgcctcagcctcctgagtagctgggattacaggcacctgccaccactcctggctacttttttgtattttttg[134 bp omitted]ggttccaccatgttggccaggccggtctcgagctcctgacctcaggtgatctgcctgccttggcctcccgaagtgctgggagccaccacacctggccactgccaattttatagatgaggaaacagaggggcagcagttagcaggcttgcccagcaggca[134 bp omitted]tactaaaacacaaaaattagccaggagggatggtgcacacctgtaatcccagctactcgggaggctgaggcaggagaatcacttgaacccgggaggcagaggttgcagtgagctgagatcacaccactgcactccagcctgggcaacagagtgagactctgtctcaataataataataatagtagtaatattaataataaggctgggtgtggtggctcgcacttgtaatcccagcagtttggggggctgaggaaggaggatcgcttgagcccaggagttcgagaccagcctggacaacacagggaaaccccttgtctctacaaacaatacaacaaattagccgggcatgcatctgaactcccagctactctgaggcggaaggatcgcctgaacctgggagattgagggtgcagtgagctaagattgcaccactgcactccagcctgggccaccagagtgagaccctgtctcaaaataataacgataatggtaaaaacccttactacacggctgtcatgcgaactgtgtcagctgttcgttcattcattcattcattcattcactcggacacccaggtgtctgaatctctttgtgctcagaccccaccctggaggatttggagcctgagtgggtgcatcccgggcatggtctggacagagctggacaccggcattcccggctctgtgcagtcagggtgggatcagagggagagacctgagattggggaataggggcagaggggctgagggctgggcctgggggggatgggagggctgcagggagtggggcttggaggatgagtgggggacatcggctaagggaagcaggaagggacccctggcagagaccggcacgtgcaaaggctcggagatgtgaaggggcagccctagagactcctccgggctggagtgcagcggtgccgtctcagctcactgcagcctccacctcccggactcagcctcccgagtagctggaactacaggtgccaccatagcagggcaatatcttaacttttttgtggagatggggtctcaccatgttgcccaggctggacttgagctcctggcctcaagtgatagtcccgcctcggtctcccaaagttccagttagggattctgatctggggagggcactggggagccacgcagggtctcaagcagggggagggatgtgtcccaactggccttcaagagtgatcgctgcactctgagtacaagtgggagcattcgaagttccattagcaagctccggtttggcaagcatggattgagcacctactgtgtgcccgtctttggcctcagccttagaggccagatcacacgaaggcttgtgggcacgcagttgggggccagccccacaggcgagtccaggctttcaaatcaggaatccccctgccctgtctgcactggtggaaactgctgaagccgtcaggagctgggagccggctcttggtggcttgatagtgtgcgatgggccagtgtaggctccatcccaggctggacaccggtcagtccccagaggaagtatcgccgagtctgggggtggccctggcgcacgtgcagaacctctcagccactctgatggtgcttaaggcaggcggtcagggtattcaagttaacttcctcttaaacagacttaattagtgttctccagtcccacataaattaatcgtggccggccacggaggctgaaacacccgatcgatggggtggctcggcgacggccaggaattctccgtctcatccgtcaccacagcaccggctgataacggctcacggctttatcttctccaacctggcatgaccagccgggggaaggcggccagaggggtctgggggggtgctggctgctctctgagcctcagtttccacttctacaggatgggatcgtgctcccacaatagcagattggcaaaggggctggaaaacagctaataataacaacttggccaggcgcagtggctcacacctgtaattccagcactatgggaggctgaagtgggagaatctcttgagcccaggagttggagaccagcctgggcaacagagcaaaac[132 bp omitted]aaccctgtctctactaaaaatacaaaaattagccgggtgtggtggtgcatgcctgtaatctcagctactcaggaggctgaggcaggagaatcgcttgaaccagggaggcagaggttgcagtgaaccaagatcacgccattgcacttcaacctgggtgacagagtgagactccatctaaaagtaaataaataaataaaaaccaaaaaatatttacccaaacatggtggtacgtgcctgtagtcccagctacccaggagtctaaggtgggaagatcacttgaggccaggagtttgagaccagcctggacaacatagcaagaccccacctctacaaaaaaattaaaaaataattagcagaatttggtggtgcatgcctgtagtcccagctactctggaggctgaggttggaggactgcttgagcccaggagatagtgactgcagtgagccgtgatcgcaccactgcactacagcctgggcgacagagtgagactgtctctcaaaaacaaaacaaacaaacaagaaaaatagtgtaacaaccaccgcatagggtcatgtggctgaccccagtgctaagcatcatctaatttattttaactaattaattaatgatttatttatttgagacgagtttcactgttgttgcccaggctggagtgcaatggagccatctcagcttagaacaacctccgcctcccgggttcaagcaatgctcctgcctcaacctcctgagtagctgcaactacaggcatgagccaccacgcccagctaatttttatattttttggtagagacgaggtttcaccatgttgtccaggctggtctccaactcttggccttaagtgatccgtccacctcggcctcccagagtgctgggattccaggcgggagccaccgcgcctggccagtatcatttcctttaatccccacaagaggcctgcagggccctccattcttctctccttttccagcgttgagtgacccctgtgaggtcccaccaccggcaaatggctttgtctggatttgaatccagtgaggagccccagaacctcagcctcaagggtctgggattttgtggataagggctgcagtggtagagactgcatagctgctatatctcacccggcacgcaggagcggctgaggccaccctagaaggctctgcaccccagtcttcaggcatccatggatttgaaggcggggctaggggggattccaggaggtgccgggtgcaggcagttcacgggggacccctccggatgagcccagccaggctgatgttcgtgcccctggggtctggaggtcctccctccgagtgggaccgaaacctacattcgagactgtctatacaaaggtattgcgaatccctgctgcacaccaacccctgggctgggggcttcgggggctgtgggcacggtcgtcatcacagtggacatgacctcttttcatggaagagaaaaaccaatgaatgtccaatgagaaaaccacggagggggccgggcgcggtggctcatgcctgtaatcccagcactttggaaggccgaggtgggtggatcacctgaggtcaggaattcgagaccagcctgcccaacatttttggtagagtagtaccctgtctctactaaaatacaaaaaattagccgggcgtggtcatgggcgccagtaatcccagctacttgggaggctgaggcaggagaatcgcttgaacctgggaggcagaggttgcagtgagccgagatcgcaccactgcactccagcctgggtgacaagagcaaaacttcgtcacacacacacacacacacacacacacacacacacacacacacacaagaaaaccacggaggggtcagagagggcttcctggaggagggggcgtaagacctggaggaagaagggccaagagggaggggtggccaagggcctatcattgtccccaagaggagaagaagagtggggttgctatgaagcagttctagaaaacctatgatcagggattatgcctgtaatcctagcactttgtgaggccg[134 bp omitted]gaggcaggagaatcgcttgaacccgggaggctgaggttgcagtgagctgagattgtgccacggcactccagcatgggcgacagagccagactctgtctcaaaaaacacaaacaaaacaagagaaaacatgtgatcagaaaagcccccaaacctggagccactccggagctgggggagccgaatgggtgggatggatagggcgtggccgcatcggagggcgactgacgagggggcggggccaagtgagtgaggcttttgtggaggggcggggccaaacgcgctaactgcatgtggacgtcgtctataggggccggctttcccagggggcgtggcctgcgtgcgacagggccaaggtggggcccaggcaggttctcccctctttgaggaccaggcctaaagcagcaaagacccatccacccaaggagttgttgagaccccgtagacctttgctaggtgtggatgacctccagccctgtgggaccagaatggggtgggagagggagacccggagctgaggaggacccggagggtacctcggaagctctgcctgggatcggggagggctcctgaaggaggcggctttgaggatacagaggacagccagctgacaagacagagagggtgcatgtgcaaaggccttgagacaccagcagagtaaaagccagtttgcctggagcagggtgcatggtgcgtggaagagcctgggagaccaggtggagacggggacagggcggggatttgtgctttccggagaagtggagaagccatgggggcttctggcaggtggagatgggcaacgatgcagttcgtataaaaatataaaaattagggcagggtgcggtggctcacacctataattccgcactttgggaggccgaggcaggtggatcgcctgaggtcaggggtttgagaccagcctggccaacatggtgaaactccagactttgaaaagtcccttctggccgggcgcggtggctcacgcctgtaatctcagtactttgggaggctgaggcaggtggatcaactgaggtcaggggtttgagacccacctggccaacatggtgaaaccctgtctctactaaaaatacaaaaaattagccaggcgaggtggcaggtgcctgtaatcccagctactcgggagggtgaggcaggagaatcgcttgaagccgggaggcagatgttgcagtgagccgagatcacgccattgcactccagcctgggcgacagagccagactctgtctcaaaaaaaaaaaaaaaagtcatttcttggactacctggagggcaggaggggagacaaaaggaggtctgggagcaacgtccaggctgggggcaaggggtgctgaggactgcggagggctgcagaggtggggagaagtcgctagattagaaacagatttttttttttttttgagacagggtctcactctgtctcccaggctggagtgcagtggctcaaacacagctcactgtgccagcctcggcctcctgggcccaagtgatcctcccacctcagcctccagaggagctgggaccacaggtgcacaccgccaggtctgatttttttttttttttttaaggcagagcctcattctgtcacccaagctggagtgcgatggcgcgatctcggctcactgcaacctctgcctcccgggttcaagcgattctcctgcctcagcctcctgagtagttgggattacaggcatgcaccaccatgcccggctattttttttttttttagacggagtctggctctgtcaccaggctggagtgcaatggcatgatctcggctaactgcgacctctgtctccagggttcaagcgattctcctgcctcagcctcccaagtagctgggactacaggcatatgccaccatgcccagctaattttttgtatctttagtagagacggggtttcaccatgttggccaggctggtcttgaactcctgaccttgtgatccacctgcctcagcctcccaaagtgttggtactacatggtgagccaccatgcccagcctaatttttgtatttttagtagagtagagactgggtttctttttttttttttttttttgagacaaagtctcactctgtcgcccaggctgaaatgcagtggcgcgatctcggctcactacaagctccacctcccaggttcacgccattctcctgtctcagcctccggagtagctgggactacaggcgcccaccatca[187 bp omitted]tgacctcatgatcagcccgactcggtctcctaaagtgttgggattacaggtgtgagccaccgcgcccggcctgattttttattttttgttagagacgggggtctctctgtgttgctcaggctgatctcaaccccctggcctcaagcgatcctcccacctcagcctcccaacgtgctgggattacaggcgtgagccactgcgcccgacagacagttggcatttctttctggagccgcctggtaggaaggaggaggttggcagtttgaggacaattttgcatgagtttggaaattggtggtctgggggaggctgaggccggattccctgtaagccttctagaggcagccggacccgagttcagaccctctgtgggccttgggcaagctgcttggcttctcagagcctcagtttccccatctgtgagacaggtgatttgcagcgagggtgaaatgaggtggagttccaaagcagcaagtcagaggctgggtggcaagaacgaaatatactccgtgtcaaaggaaccactgctgcagtccacacccccgccctgctagaccctcagctcctgcagggagaggccggctgactgcgttctgtgtcgcttctccagagcctggatgtggaagggagggagggaggtcgcaaatgtccccttccctctaggggacctggcgtcacgccccatgagaaagccggccacagcaggccacgcccaaacacaggccacgcccacacaaggcagcgcccctccaccaaagccacgcccacctgccccgcccctcgtcagttgcctccacatgaggccacgccgcacccactcggttcccctctctgaactcatgggaatgacccaagcaggtcttgtctttgcgcctcagtttctccaacacggaagtggccacagctgatttccgtgcctctgtctgagctgggaaacgaccctcaccggcttggaggaagccttggtccccagcccggcccccatctccgcgccggcttgcactccccagggacggggagctcaccccctcccagagccctggagtggaggtttgatgcctgtcaggctggggcccggggatgggtctgggggaggcacttctgagaaaaggtggaaacggttctcagaaaccccgaaaccctgagggactcttttccttctcagaaatgctccccccgccccagactcgggaaaacgcctgttcgagaaagctgggctggctgtgggcaagaggcttggaccggcccctgtggagcccctgctccaggctgctgggaatgtcccccttctccagctgtgacctccaccccaggcaagtgtttcctgccacctgcctgtccccaaggggtccccatgttccccgcctgctgccgtccacctgccgtgtcctctgtccctccccacacggggcagggggccactgtgacctgaagcccgtcctccccaccagcttggccatgctagacacaggggcctccccagagtgtatcctccccaaaacagcccaggaacacaccacaccccacccccgaatttgcagccctggggcgggctgtggactcaccagctgatggcggcccctgacggtggtctcagccagggccctgccgggaagagagagactcatcctcagtcaggtgttaatccacctgtgcccctcacttgtcccaggtgcccatgagaaggaagggggccgtgggcagctgatggccaaaatgcaggggagccccagtgtcagggagggacacagcacctgccccgaaaatccaggcagtccttccggaaggagccggagcctctgtgtgtggagacgggtgggaggtccccagcctggcgcccggctgcccctgtgcctagggtgtcctagttcagaggtccccactgtccccgctttggggtctcccatagggtaacccccccatgaaggccctgcaaccctctcccctcccctggtgtgtcccccctccttctgaaatcactaatgggttacctcctctagcctcca[139 bp omitted]tatgctgaaaccccatctctgctaaaaatacaaaattttgagacgggggtctcactctgtcgcccacgctggagtgcaatggcacgatctcggctcactgcaacctccgcgtcccgggttcaagagattctcctgcctcagcctcctaagtagctgagattacaggcatgtgccaccatacccggctaatttggcatttttagcagagatggggtttcagcatgttttccaggcttgtctcaaacttctgaattcagacgatccgcccacctcggtctccaaagtgctggtattacaggtgtgagccactgcacctggtcagaatgccttattggaagaatcaatcttctttctttctttctttctttctttctttctttctttctttctttctttctttctttctttcttttttttttgggttggagtctcgctcttgtcgcccaggctggagtgcagtggcacgatctcagctcactgcaacttctgcctcccaggttcaagcaattctcctggctcggcctcctgagtagctgggattacaggcacccactgtcacaccctactaatttttgtatttttagtagagatggggtttcaccgcgttggccaggctggtctggaactcctgacctcaaatgatcctctcgccttggacttccaaagtgctgggataacaggcgtgagccaccgcgcccggcaagaagaatcaattttcagaatgtgggtgtgtcagacagatgcaagcagagtcctgtcctccaggtgggggtgcaggctgggtgcctgccctgcagctgctgtaataaatgacctcaaatttattggctcgaaacttcacagatttatgctttcatggttcaggagataagaaatcctaaaatcaaggcatgggcagggctggtccctcctggaggctccaggggagaacccatttcctgcctttcccagggtctagaggcgtccgcatccctcatcttagggccctttctcccccttcacagccacagtgctgccttttccagtctctctctgactccccaggctggggtgcagtggcaccatctcagctcactgcaacctctgcctcccaggttcaagcgattctcctggctcagcctcctgagtagctgggattacaggcacctgccaccacgcccagctaattttgtatttttagtagagacggggttacaccatgttggccaggctggtctcgaactcctgacctcaagtgatccacccaccttggcttcccaaagtgctgggatcacaagcatgagccactgctcctggccctcccgccgcctcttaaaagaaccctgtgaggacattgggcatcccccagataatccagtatgatctcctatccaaggtccttcatttagtcccatctgcagagtccctttagggatgtaaagtgacctatccataggtttcagggattaggattcgggggtgcacatctgtggggggccactattcagctcgcccagaggacacttccctacacaactcccccattcctgaccctaccttggagctgggagatgttcacagcctctgaggctgccaggaacactgcaaacccccagagattagatgatctccaacatattccaacgatttacttggcaagcatttgttaagtgcctgctgtctaccaggcccatctggctggtccggcttcatggatgtgtagcccagtggttcagggtttcatgtttggcttaatgctctggtgtctgtcaccatcttgatgcttttgctaatttgatctttgaacttgtgtgtgtgtgtgtgtgtgtgtgtgtgtgtgtgtgtgtttgtttgtttttaatgcagtctcgctctgtcacccaggctggagtgcagtggtgtgatctcagcttactgtaatctttgcctcccaggttcaagtgattcttctgcctcagcctcctaagtagctgggattacaggtgtgagccaccacacccggctaatttttttgtatttttagtagagatggggtttcaccacattggccaggctggcctcaaactcctgacctcgtgatctacccaccttggccacgcccagcctgaacttgtgttttataagtgaagtccagtggaacagtggagcgagcctgtgagcaagggaggtcctgaaaacgtgtgtgcttagctattccatgttggtctgtttgcacctagtggtcactatgcccaggggcacagagatccaggatcccacagctcatgagagttcagcgagacccaaaacgagtaccaggtgagtgtgtgagagagttggtagaataggcgtgcacgaagaggtaaaataaaggctgggcatggtggctcatacctgtaatcccagcgctttgggaggccaaggtgggaggattgcttgagcccaggagctcaagactagcctggaaaacatagcaagaccccatctctaaaaaacaaaaaaatgaacaaacaataagccgagcatggtggtacatgcctccagtcccagctactctgaaggctgatgctggagggttgcttgagcccaggaggttgaggtggcagtgagctgtgattgcaccactgcattcccaccttggcaacagagtgagatcccatctccaaaaaaaagaaaagaaaaggaaagaaaaagtgaaataaaaacaggttaattttgttcagtgtttcagttgttcccatcagaaccaaacacatatgctcatgcaatctccaaaacacaaatggcctaatttaggtgattctgtagacaagtcacatgttcttaaagaaccatagccaatatttccagaccaaatgatgaaattctttcaatagttgtatttaaacctggcattacatagcataaagatgaatggtcaaattcacaataataaattaaattttaaaaattttaggcttaaaaaaatttaaaagttttttaaaatttaaaaattaaaaaaattttaggtggttcacgcctttgggatcccagcactttgggaattcgaggtgagaggatcatgcgagcccaggagtttgagaccttcctggctaacacagtgagaccccatctctacaaaacaatgaaaacatcagtcaagtgtggtggatatggcttggctgtgtccccacccaaatctcatcttgcattgtagctcccacaattcccacgtgtcgtgggaggaaccctgtgggaggtgattgaattatgggggcgggtcttttctgcgctgttctcgtgatagtaaatgagtctcgcgagatctgatggtttaaaaacgggcgtttccctgcacaagctctctctgcctgctgccatccatgtaaggcatgacttgctcctccttgccttccaccatgattgtgaggcctcctcagacgtgtggaagtgtgagtccattaaacctcttttttttttcttttcttttcttttattgaggtggagtctcgctctgtcacccaggctgcagtgcagtggcgtaatcttggcttactgtaacctctacctcctgggttcacaccattctcctgcctcagcctcctgagtagctgggactacaggtgcacaccaccaggcccagctaattttttgtatttttagtagagatggggtttcacca[136 bp omitted]tatcagcagcatgaaaacaggctaatacagtggtggtgcatgcctgtggtgccagctacttgggaggctgagatgggaggatcacttgagcccaggaagtcaaggcctcagcaagctgtgattgcaccactgcactccagcctgggcgaaagtgagactctgtctaaaaaatatgtaaaataaactgtagaatgatgtggaatagcaaattgaagaaaactatgacaagttgagagagactgtagaagaaagaaaaaagctttaatgttagcactttgaatgatacttttttcttacttttttttttctttctttttctgagacagtctcactctgtcactcaggctggagtgcagtggtgcgatctcagctcgctgcaacctctgcctcccgggttcaagtgattctcctgcctcagcctcccaagtagctgggactacaggtgcgtgcaaccatgcccggctaatttttgtaattttagtagagatgaagtttcaccacgttagtcaggctggatggtcttgaactcctaacctggggtgatctaccagccttggcctcccaaagtacaggcatgagccacagcacctggccagtctgtctttataaataaagctttattgacacacagccacagccactcacttatatattgtctgtggtggttttactgccactgcagagctgagcagtcctgacagagactgtccaattcaaaaagccaaaaacattggctacctggtcccttatagaaagtttgcagagggccggg[175 bp omitted]gaggcaggagaatggcgtgaacccgggaggcggagctcgcagtgagctgagatcgcgccactgcactccagcctgggtgagagagtgagactccatctcaaaaaaaaaaaaaaaaaaagaaagaaagaaagaaagtttgcagagcctggtctcgagggtggagtccagaggtgaggctgggagaaggtgagggctgctggaacatggcagagcgggcgtattccagggagacttgggtgagactcgaggatgctggagaaggtaaccatcggggtggggtgcgaaggagggcagcaactctcctgggagatgggatggatggtggggccgtgggtgagatggggtcatgcagagaggacagaccaaggccccagtggaccctgggggaccctgtggctgtcttcagagcagcccccgaggtatcagtgctcacagcaacttgcggatacagcctagaaggccccatgcctcaaaaattcttagagtctgaggagctcaagaggctcacatcagcttcgggaagctctgtagggcggccaccaagctggactgagggatgggcgg[134 bp omitted]accaccccccacccccgccaacttatacaaaaatttcaaaaattcaggccggcacggtgctcatgccggtaatcccagcactttgggaggttgaggttggtggatcacctgaggtcaggagttcaagaccagcctgaccaacatggtaaaaccttgtctctactaaagatacaaaattagctgggcctgatagctcatgcctgtaatctcagctgcttgggaggctgaagcaagagaatcgcttccacccagcagatggaggttgcagtgagccgagatcgtgtcattgcactccagcctgggcaacaagagtgaaactccgtctcaaaaaacaaaacaaagcaaacaaaaaaattcaaaaattagccgagtgtggtgatgcacacctgtagtcccaactactttggaggctgaggtgggaggatcgtttgagtccaggaggttgaggctgcagtcagctatgattgcgccaccgcactccagcctgggtgacagagcgagaccctgtctcaagaaataagaagagaaggaagttggtggaggacattccacgccaaggagcccatgagccccggctggtggtgcacgtggagcatttgaagtcaccaccagtgacccggcccaggtgcctctgcagtgggacgggaggccggctttggtccagctcagacagagcttcagatgcccatcaagggatggggggctttgttgggaaccccatggtgccccctgggcctgcacatgtcgccccagtcccaaatatgctcccacctctggggccaggccactgaacgcccttcaggacactgtccaggggccagagtcaccatctgctgacccggcacccaaatcttccgcctcagaccctcctggccctccggttctccctctggctggccctcagccctccctggcacggaccacgtcttccgaggatgccccggaagatgcaccgtggataaggccatgcgatcaataggtccatcggccgccgggggggcggaagcgcggctcatcagggcgcctgctgtcccctccccaccctccaggaaggcggataaggcccggggaccctcttaagggacgcctggcacccgcccgccgcccggcactcctatctcccatggaaggacccagttcctgaattgccccatgggccgcgccgcaggcctgcaccgaagctcttaatagcctgggcctaatgttttattgttggttttaaaagtgtaattagttcaagtgtaaacagaaaaaacctgcttaattaagaatttttaaacaggggcataaagcgggagcgggagcattgacgaaccccaagctgcttcataacatcgatcggaagaggctccgagtggagggccgggcggggcgggcgccgcgggggcctgggagcctcccctggatgccatttgccgcccgggtgagggccccggggacctgctggtttacgatcggggtctcgggaccggtgcctaatgatttttatgcattaatggagatgacagttggccaagcaggctgtttaagaagcctttatggggggctgggagcccagtcctgtgaccctgggctgtctcgggggtgagaacccccgctgggagggaggccctggcgctcccaccctcctggggccggcttgctgggcggggtccgggtgttgccccctctccaagtggcacccaccgagggagtctcagcatcaccgtgtcacctcccggccgatccggcctgtctcggagtcaggacttgaatttccttcgaactgcaaggggctctgccttctacagagccggggcggggcggccctgacagtggggctgggggcgtgggctgtgccatgtgcctggcatggggcctcatgccggaatgaaccagagcccagggtatgctcagcctggccccggccgctggggaggggagggtggggccctgacccttcaccaggaggtggggaagaccccaggcggggcttaggggcaccctgggtttggagatttggctgctctaaacgtagagagcctggtggcccttggcacccatgaccctggagagcaaggcctgggggtcttggggggccacaggcgagcccaggcaggggctctgctccagcctcagtgccctggtctgtggcaggtctgggggttcctgcccttgtgagcccccaaggatgcatacacggaggggggctcagaaggcaccagcacgtggaagctggtggggtcctgctctccgcctgagcctcacagagccggggggttgctggtcccggtcacttcccacccccataccgacccctatgtggagatgggggacaggagctggcctggactttggtccttgccttccaggaggagcccaggctctggagttactgtgaccgcctcccttgtggccgagacgcggccccatttgacaggcgtggccaccaaggctggcccaggccccatggggacccaggtgtcggatccgactgtgcccggcttcaaggctccagcctggacctggcagggagccagagagggcccaggcttgaggccccagatggatgctctgtttccagaacaaagaggtgtcaagacccactgtgtgctgggggtcccacccccggccctggaacctggggcaggaaggatactccatgcacacctttcagggggtcagaggctgagacggtgcctggggcagacccgtgggttggggtgggggtgcccagatcttgacccccatccgtattcccaaggggcagagatgggacgtgactcctcctggcccccgccgccggcccgcaggtgttggggtctctgggctgggtctcccggcgttgtggctgctgccgagggagatgaggccaccctgatccccgcctgctccagccgcagcaaccaaggacgatcgatagccgaggcggccgctggggcttctctcctcttgctgtggggtgggggctgggtgcggggcagccagaactggggccagaggtgcagacgggcgggagcatctgcagcccaccggtgtccctggctcctgcgcgctctccgtctctctctatctctccgtgtctctctatgtctctgtgggtctctgtctctccctcttagtttccatttcttctgcctctgtctctgtgtctttttgtctctctgtctctctgtttctgcctctctctgattgtgtctcttcctatctctctatctctgtctttgactctctgtctctctctgcctctatctctgtttctgtctctctgtgtctctctctgtctctatctcttctctatttcactctctgcctctctctgtctgtgtctctgtctttttctgtctctttctctgtctctctgtgtctctctctgcctctatctttctctctgtctctgtgtctgtctctgtctctctgtctctgcctctctctctctctgtctctatctcattctctgtctctctgtctccctctctcctcctccctctctctctttgctcccccctctccatcacagaacccaaagcaggacctgagatctcccccagaaggtgccctggggagcccccatcacagctgaggacgggcagactcaggatcacccccgtggctcctggcccccgcccggccctggccgagtctcctgtccacccagcctttgttcaagtttgaaccttccccacacatcagaggcttcagatttccccggagaatccgatttgggccactccgacgctgcagctgcgtctgtattccgggcgggtcccggccccacagacttcccgccatggcccacttcctggcacgggttggttggcccctcaccggctgtgaggtggggtccctcgccagtgggcagatgaaagcagtctcccctcctttccccagccccccggccggaatccacagcctcaggtggtggaaagagcactgtgcggggggagtcacaccctcccaggttggagtgtccctcacagtgggaccctggagcctcagggctctcgtctgcaaagtgggggtgagtttgaggaaacaacaccatttcctggagacaggcaagggccccttaacggccaagacacttgcagtacaagaactaggaaactgggctgggcacggtcgctcacacctgtcatcccggcgctttgggaggcctaggtgggtggatcacc[133 bp omitted]gaggcaggagaatcgcttgaacccgggagatggaggttgcagtgagccgagaccacaccactgcaccccagcctgggcaacacagcgagactccatctcaaaaaaaaaaaaaaaacagaaaacaaacaaaataactaggaaactgtacttaaatggcaagaacaattgagtgaaggtggggtggaaattcaaatccagctgcagtatcagtattttccaaaatgtctacaattttcacttgttaccttgggcgaggcacagtggctcttgtctataaacccagctactcaggaggttgaagcgggaggatcgcttgagcctggaggttgaggctgcagtgagctgagatcacaccaccgcattccagtctgggcgacagacggaaaccctgtatctaaagagaagagaagagaagagaagagaagagaagagaagagaagagaagagaagagaagagaagaagaggaagagaagagaagagaagagaagagaagagaagagaagagaagagaagagaagagaagagaagagaaaagagaagagaagagaagaagacaccacaggccaggcgcagtggctcatgcgtataatcacagcgctttgggaggccaaggtgggagaattgcttgagctcaggagttcgagaccaccctggccaacgtagcaaggccccatctccagaagttttgttttgtttttttttttttttttgagacggagtctcattctgttcgcccaggctggagtgcagtggcatgatctcggctcattgcaacctctgcctcccgggttcaagcgattctcctgcctcagcctcccgagtagatgggattaaaggcgctcgccaccatgcccagctaatttttgtatttt[132 bp omitted]acaatgagcatccttggacatgaatctcttacactctctgaagtttttcttcaggacaaattcatcctggagttgcttgtcaagagaccataaaacaaatagtaaggcttttgatacattttatcaaattatctctgaaacttcataaaatacatatccttccattgtacatcagcctgttcatttactctcatccatgccaataatgggagttgttatatatatataatatataatattatgtatatcacatattatatatagtatatataatataattatatataataaatatattaaaaattatatagtttatataattatataatatataaatatatatttcatatataaatatatgtatttatatataaatgtatatttcatatataaatatatgtatttatatataaatgtatatttcatatataaatatatgtatttatatatataaatacatatatttaaatatatatatttttagacggagtcttgctctgtcgcccaggctggagtgcagtggtgtgatctcagctcactgcaagctgcgcctcccaggttcatgccattctcctgcctcagcctcccgagtagctgggactacaggcgcccgccaccatgcctggctaattttttgtatttttaatagagacggggtttcaccgtgttagccaggatggtctcaatctcctgacctcgtgatccactcgcctcggccttccgcccacctcagtctctcaaagtgctgggattacaggcatgagccaccgtgcccagccccaggagttgttatattttaaaaatcaaggtatatcatctagcaagtctacttctagatctgtgtccaaaatagttgaaaagaggtgtttaaacaaatacatggctgggcacggtggctcacacctgtaatcccagcactttgggaggctgaggtgggcggatcacaaggtcaggagattgagaccattcaggctaacacggtgaaaccccatctgtactaaaaatagaaaaattagccgggagtggtggcgggtgcctgtagtcccagctacttgggaggagaatggcgtgaacccgggaggtggagcttgcagtgagccgagatcatgccactgcactccagcctgggtgacagagcaagactccatctctaaataaataaataaataaataaataaacataaatatatttgtttgtaaatatcaatatattaataaataatatcaataaatggttggtggatgaatggaagagatggattgatagatcagtgggtaggcagtgtatggatgaatggttggatgcgtgtatggatgaatgatcacaggaatagatggatgaatgggtgtacagatgaatggaagaatggatggacagatgaatggacggatgaatttatggaaggtgtattataatagatgatggatgtatagatggaaaaattgatgataggtggatagatgaatgaatggatggataggcgaatggatgagtctatagatggatgatgaatgtatggtggcagtacggacggacagatcaatggacagatggatggatagtgaatgtatggtgggagtatggatggacagatcaatggacggatggatgggtagacagttgggtaatagtgggtggatggatggtgtcttagtctgtttgtgttgctacaaaggaatgcctaagtctgggtaattaatttttttaaagaagaggct[131 bp omitted]cctcagcctccccagcagctgggactacaggcacccgccaccatacctggctaatttttttgtatttttaatggagacgcggttt[139 bp omitted]atatcttcttctgatgagggcttcaggaagcttccactcaaggcaggaagcctccctgtgcagattacatggtgagagagagaaggaagatgccaggcgcttttcaacaatgagttctggcagaaaataagagtgagaactcactcctgtgagaatggcacaaagccattaatgacaaatccctcccaccagaccccaccttcaatgttggggatcaaatttcaacatgagacttgggaccaaacaaatcatatccaaaccatagcagatggatgagtgggtgggtgatggatggagggagggagggaggaagggatgaatgggtggatggacgacagaatggatggatggataggtagatggatggatgaatgggtgggcaggtggataggtggatgagtggatgggtagatgagtggatggatgggtgggtagatgagtgggtggatggatggatggatggatggatggatggatgggtcaatgggtggatgggtggatggatggatgggcacatgggaggatagatggatggatggacggatgggtcaataattgggtggatggatggatagagaaatggatgggtcaatggatggatgggtgggtggatggatggatggatggatggatggatggatagagaaatggatgggtcaatggatggatgggtgggtggatggatggatggatggatggatggatggatggatggatggatatgtgaatggatggatgaatggatggatgagtgggtgggtggctggatagatggatggatgggcaggtatatgtgtgggtggatggatgggtgggtggatggatggatggatgggcaggtgcatgtgtgggtggatggatgggtgggtggatggatggatggatgggcaggtgcatgtgtagatggatggatgggtggatggatgtgtgaatggatggatgagtgggtgggtgggtggacagatggatggatgggcaggtgcatgtgtgggtggatggatggatggatgaatggatggattaatggatggatggatggatgagtggatgggtgcatggataaggatacacatggatgggtgaggagatgaatagacaggtagttgggcaattgtccctgtgagtcccgcatcaatgggaatgcatgccaccccttccaagggcctcttggctcacaggtgttgcacttccaggattgaatgcagccatctgccactccctggatcccagtctccctgcacagactcatcctgggggaggggacacagagtccacgttgctgcccctcccatgctagcctgcaaacctcctccccagcaagagcagatccaggagccacgaatacggtggaggatgcaaaacggtaattaatctgtggtgggaggggggtgttaataccttaaagacacggggacacactggcagctcctaccaattagtgacctaaccctgccagtgtgctctccgcggtgtggccgagttgattactctaattaattttgcatcgacctacatggatctgctgggagagggctgatcggcatgggagacagatgctgccaacccgtagcacccccctcattgcccagtccacaaggtcaaacgccatcccacctggcctcccgggccctgggaaggtggggtcgctcccgactctccaggacacacaccaagacctgcctccctcccatcctcaaaaagcagaggggggccgggcgcggcggctcatgcctgtaatcccagcactttgggaggccaaggtgggtggatcacctgaggtcaggagttcaagaccagcctggccaacatggtgaaaccccatctctactgaaaaatacaaaaattagccgggcgtggtggcgggcacctgtcatcccagctacttgggaggctgaggcagaagaatcacttgcacctgggaggcggaggttgcagtgagccgagattgcgccattgcactccatcctgggtgacagagcaagactctgtctcaaaaaaaaaaaaagaaagaaagaaagaaaagaaaagaaaagcagaggcgggtacagttggacaacccacactcactcccgccttggtgtccttgtccagcagtggcagggagggctgggagcagagcgccttccagggccaacagacacccctgaattggtcttgatgtcatttcaacctgagaatgaacagcagtgatggaccaggtgtggtggttcatacctgtgatcccagcactttggggaggccaaggtgggaggatcgcttgagcccagaagtcgaggctgcagtgagccgtgattgcaccactgcactccagcctggacaatagagcaagaccctgtctcaaaataaataaataaataaaagacaatagcagtgatgggggcgtcagatgggagagaatggaggcggcatgaactagatgcttacagttcttgaggcttccctgtcttggcttttaccacagcccaggctaaccttaccatgcatgggggagctgccctacatcccaaggtgtattaatttcctattcctgccataacaaattaccacaaac[143 bp omitted]tctactaaaaatacaaaaaaaaaaaaaaattagccaggagtggtggcgggcgcctgtaatcccagctagtcaggaggctgaggcaggagaattgc[134 bp omitted]aggtcagaattctgcaataggccttactgagctaaaatcaaggtgtgggcagcactgggtcctcccagaggctccaggggagaacctgtttcccacacccctcagctgggggccccttcctccacctccacagccagcagcacagcctcctccagtctctgattgtcaccttcctgcctccttccaggagggccctgtgatgacgttggggccccggataaccccggatcacctcccattccaagttccttaacccaatcccacctgtaaagtccctttggccatgtgaggtgacaggtgacatatccgcaggtcctggaggttaggacgtagactttggggaggggagttactattctgctgaccacacaggagcatcttcctactgaggcaagtgatccccaactcatgttcagagctggatacagccgcacctgaatgcaatgttaattttattattattttattttattttattttatgtttgagacaggctctcactctgtcacccaggctggagtgcagtggcatgatctcggctcactgcaacttctgcctcctgggttcaagcgattctcctgcctcagcctcccgagtagctgggattacaggcacctgccaccatactcagctaatttttatatttttagtagagacggggtttcaccatgttggtcaagctggtcttgaactcctgacttcaagtgatccacctgcctaggcctcccaaagtgctggagttacaggcgtgagccatcgcgcctggccgtgaatgcaccgtttaacttgaactaacccatcctgagacaacagcctggggaccaagaatctctcccggcttttcccaacaccccagttccccgccccgttttctccattaccagatgaatgatgaggaaggactacagtgttgagttgaactacagacaagattttgttgtttacagctaggtgcatgttcatatatacatacacctttgtaatccccatccaaaaccaagatctgaaacattttctttaccccagaaggcccccttgttcccctaccagtctccaccccctggggtaatcactgccctgacttccatcattaagaactggttggccgggcgcggtggctcacgcctgtaatcccagtactggggaagccgagatgggcggatcacctgaggtcgtaagttctagacaagcctggccaacatggtgaaacctcatctctactaaaaatacaaaaattagctgggtgtggtggtgcacgcctgtaatcccagctacttgggaggctgaggtaggagaatcacttgaactcggggggcagaggttttggtaagccgagatcatgccactgccctccagtctgggcaacagagcgagactccatctcaaaaaaaaaaaaaaaaaaaaaaaaaaaaaagaactggttataacatctgctctggaaattcatcagaatggaatttatgcatgttcagttgtgtctgctccttttatttaagaatatgtttgagagattcgtccgtgatactggatgtttcgatgcttgtagttatttattgttctgtagcattctattatatgaagatacaaccactgggtctaccttgagcaaatctgctatgaacaatcttttttttttttcttttttgagacaacatctcactctgttccccaggctggagcacagtggcacaatcatggctcactgcaacctcgacctcccgggctcaagcaatcctcctgcctcagtctcccaagtagctgggactacaggcatgcaccaccatgcctggctaactaaaaaaagattttttttttttagagacagggtctcgctatgttgtccaggctggtcttgaactcctgagcacacgtgatctcctgaggagatgtctctgcaaa[151 bp omitted]ctactgaaaatattaaaaaaaattacccgggtgtggtggcgggcgcctgtagtcccagctactctggagactgaggcagaagaatggcatgaacccggga[137 bp omitted]acaattgaaggacaaaaaagaacgtggaagaaatggagagacatcccaactgccaggtgaaatggccaaataatgttaaaatgtcaatttcctctatgtgaatccatacatctttatttcaataccaatcaaaattccaatctgacttttgttcagagtgaaggagaaccgaacacaattattttaaaattcatatgaaagaatatacatttcagactcaccaggaatttttttttaagaaaagagtagaggaagggcatttgtttttgtaagaagttgaaatgtattgtaaaatgacaataattataaagttacaatatcgtttacctaaaaactaatcaaagtgtatattaacttagagtggaattgaggcgtctttccctttttggcgg[142 bp omitted]catggtgaaaccctatctctattaaaaaacacaaaaattagccgagcatggtggtgggtgcctgaatcctacctactcgggaggctgaggcaggagaatcgcttgaacccgggccgagatcgctccattgcactccagcctgggcgacagagcaagactctgtctcaaaaaaacaaacaacaaaaaaagaatataataaagaagctggggacagtggtgcacacctgtaactgcagctactcaggaggctgaggcgggaggatccctagagccagggagttcaaggctgcagtgagctctgattgcaccattgtactccagcctgggcaacagatcaagaccctatctttacaaaaaagtagagactctgtctcaaaaaaaaaaaaaagaaagaaaaaatatatataaaataacgtgggttgtgtattccagtatgtcaaagaaaatctatttctcagaatctaaaatctctctcacaactataaagagatatttatataatggtcattgcagtattctttgactagtttttttttttaaattggcaataatctaaatgtctgtattaatcagggtccctgctatggtaaattgattgcaaaactggtctcaattcttcatgctgtcccggcgcggtggctcaagcctgtaatcccagcactttggagggccaaggcaggtggataacttgaggccaggagttcgagaccagcctggtgaacaaggcaaaaccctgcccgtactaaaaatgcaaaaattagccaggtgtggtagcaggtgtctatagttagtcccagctacttgggaggctgaggcagaagaatggcgtgaacccgggaggcagaggttgcagtgagccaagatcgagtcattgcactccagcctgggcgacagagtgagactccgtctcaaaaaaaaaaaaaaaaaaaaaagtttaataaagagggttgctttattttattttatttattttttatttatttatttttttcagacggagtttcgctcttgttgcccaggctggagtgcaatggtgagatctcggcccactacaacctccacctcccaggttcaagcaattctcctgcctcagcctcctgagtagctgggattacaggtgcatgccaccacacccagctcgtgtttttatttttatttattttattttatttatgtatttatttttgagatggagcctggctctgtcacccaggctggatctcagctgcactggcaggatctcagctcactacaaactcctcctccccggttcaagctattctcctgcctcagcctcccgagtagctgggattacaggcatgcaccaccatgcccagctgatttcatatttttagtagagacaaggtttcaccatgttggccaagctggtcttgaactcctgacctcaggtgatctgcccgcctcagcttcccaaagtgctgggattacaggcatgagacaccgtgcctggctcctatttattttgttgaaacagggtctcactacattggccaggctggtcttgaactcctgggctcaagccatcctcctgcctcagcctcccaaagtgctgggatcacaggtgtgagccaccacacctgttcctataaagaagatttttttaaaaagggctgggtgcggtggctcacgcctgtaatcccagccctttgggaggccaaggcgggtggatcacaaggtcaggagttcgagaccagcctgaccaacatggtgaaaccccatctctactaaaaatacaaaaattagctgggtgtggtggcatgcacctgtaatcccagctactcaggaggctgaggcaggagaatctcttgaacccaggagacggaggttgcagtgagccgagattgtgccactgcactccagcctgggcgacagagcaagactccatctcaaaaaaaataaaaaaattaaaataaataaatttttgaaagatgtagaggccttgagaaacaagacgaatggtgcagaatctccaggctaggaacatgtgggagccgtgagcatcagagactgaaggggttcagggagacagtggccacgggaacttctcctcccactctccaatgtcctataagaattgtttgttggtcaaacccagctggaaaccagagagcaaggaaaccccacgggtcagcctccctgggcacagagcagggccctggggagaaaatggaatttaaccagctcagtgtttatcaatacaagaatggttacattctcaacagagcatcagcatgtgcacatggggtatataaagccattaacagtccaggcatcaaggctcacacctgcaattccagcacttgaggaggctgaggtgggaggatcccttgtgtcaggagttagagacgagcctgggcaacacagtaagaccctgtctctacaaaaagtacaaaaattacctgggcatggtagtgtgtgcctataatcccagatagtctaaggaggctgagttgggaggatggcttgagcccaggagtttgagaccagactgggcaatatagcaagaccccatctcaaatattttttgtttttgtttttagatgacatcttgctctgtcgtccaggctggagtgcagtgatgccatctcagctcactgcaaactccacctcctgggctcaagtgattttcctgcctcagcctcctgagtagctgggattacaggtgcctgctgccacgcctagccaatttttgtattttttttggagatggggtttcaccatgttggccaagctggtctcaaactgttgacttcaagtaatccacctgcctcatcctcccaaagtgctgggattacaggcatgagc[309 bp omitted]tggcgggtgcctgtagtcccaactacttgggaggctgaggcaagagaatggcgtgaatccgggaggcggagcttgcagtgagccgagatcacccccactgcactccagcctgggcaacagagcaagactccgtctcaaaaataaataaataaataaataaataaataaaaatacaaaaattatccgtgtgtggtgatgcgtgccttaatcccacctactccggaggctgaggcaggagaatcgcttgaacccaggaggcggaggttgcagtgagcagagattgcgccactgcactccagcctgggcaacaagagtgaaactccatctccaaaaacaaaaaacaaaacaaaacaaaaaacaaaaagggatgttcatatctctaagtgcagctacatttttaaaagcctaaattattatgaatcaaaataagagaggtatcaacgccatgtaggagcgtggaacagaaaaagaacattcctgaaaagc[143 bp omitted]cgaaaccccatgtctactaaaaatacgaaaattagccggacatagtggcacattcctgtaatcccagctactcaggaggctgaggcaggagaatcgcttgaacctgggaggcggaggttgcagtgagccaagatcacaccattgcactccagcctgggcaacaggagcgaaactccgtctcaaaaaaaaataaataaataaaaaataaaaaaagaactgaaattaattatcaatgatgacattttcttcattttactttttaatattttctaattagtttttcagtcagaaagaaagaacggccaaccatgtacggcaggtcacagataatatgcaaagccatttctgtaaacgtctttaatatttatgtacaattattttgcacgtatgtgcatgtttacaggcaagacacttccaaagctttctctctggaacagtgagattgataattttttgttgtggtggttgatggtctccattttactacagttttaccacccaagacacgcattgtttgtgtaataaaaaataataactagatttatttttctacctccttcacttcccctgtggcctctctcgaatttgcccgacaacctttcccaacacccatgataattgatccttaatcaaatattcaaatgggtgcttcaaggaaaggcacggtgctttggcaatttggatgataaataatatttcttcgctttgtcccccccacgctgcttctccctccctagtccccctctttttgcagcccaaccccgacgtcgccccccgccccactagaatctcgcaaatatcttttggttttaagagttccctggggaagccttgttctaaatgaggtgtaaaaatctaagcggcacaaaaaaaaaaaatagtgcgaggttggaatcaatattctcttcacagctccatcgattaacaaccatattcttcatttattaattatgaagggggatttcagagcctccgtctccttctttcgtggtaacatggcggcttcccctcctccctgcctcccccaggtctggggcctgtggtacccagggctcagcatccccggggccaggggaagagggagggaagtgggcgttctgcccccactggcaggtccagccaggagcagagagctctgtctggctttggaatctgcctcaacgcaaaggagtctagttctccgttcccgtgctggctttgccatctgtctctttagaagacaagctccatggccgggtgtggtggctcacgcctgtcatcccagcactttgggaggccgaggcaggtggatcatctgaggtcaggagtttgaaaccagcctggccaacatggtgaaaccccgtctctgctaaaaatacaaaaaattagtcaggtgtggtggtgcgcacctgcaatcccagctactcgggaggctgaggtaggagaatcgcttgaacccaggaaggcagaggttgcagtgagccgagatgctgccactgcactccagcctgggcaacagagtgagactctgtctcaaaaaaaaaaaaaaaagggggagataagctccatgtgggaccttgtttgctttccccagctgtgtttctgactctgggcgcacgtgctctatgaaactgtgctgagtgagtgataagacagtggcagaatcacatacacaagagacgggaaggaaagagtggagttcaaaagctggctctgactacggtccattcatgtgcgttggcctctgggagtctcgcctccctttctgctgctctatttctgaccctggacacacatgctcagtaaagctgtgctgagccagttaaccatgagcagggtggcggagtgcggcacctggcagccctggatctcgctttcctaacctcgtgggcctcagttttctcatctgtaaaatggcacctccatcagatgaggccatacctcatgtcagcctttgtttgggctgaacccccttgtttatattggggggatgtctttgatctgggaagtcactgggtcaggacgcaggtcagattcacctttgtccccagagcacagcatcaggatggcccagaagtgatcactgaaagttcttgcgggtggacaaatggatgggtgggaggttggatgggatggatgcatgagtgagtgtgtgggtgggggatgaacggatgtatgggagggcagacgagtgaatgggtatgtaagtggatagatgcgtgaatgaattggtcaatgagtctgagtgtagttggatgggtgactggaggaattgagtgaatggatgtatggatagatgggtacatgggtgtgtggatgggtggaagggtgagtggataggtagaacaatgaatgggtggatggcaaaataaaagataaacaatgaatgagtggatgaatagatgggtaaatggtctggtgaatggatcggtgggtggctggttggctaggtgggtgagtggatcgatatatgagtgaatatatgtgtaatgagtgggagaatagacaaatggctagatggatgggtggacggatggctagaaagacagacaaatggatgagtggatgggaggataaatgggtggatggatgggagggtggatggatgggtggatggatggataggtgggtggatggatgagaggatgggtgggtgggtggatggatgagaggatggatgggtggatggatggacagatgggtagatggatagaaggatggctgggtgcaggaggatgaatgggtggatgggaggatggatgtatgggtggatggatggataggtgggtggatggatggatgtataaatggataggatagatgaatggatagatggataagtgggtggatggatgagaggatggatgggtgtagaggatgaatgggtggatgggaggatggatggatgagaaaatcagtgggtggatagatgaatgaatggatgagaggatggaggacaaatgggtgggaggttgaatagatgaatggatgaataggtgggaggatggatggagggttgggtgagtgagtggatggatggacagaggggtgggaggatggatggatggatggatggatggatggatggatggaacatggatggatggatggatggatggatagatggaaagatggatggatgggtggatggatggatgtgtagatgggtagatggatgggagaatgaatgggtgtgagaggttggatggatggatgggagggtggatggagggatgggtggatggatggattcatgggtagatggaggacggataagtgtgggaaaatggttggatgataaatgggtgagtgtcttgatggaggggcaggtgggtgggttggtgggtggatggatgggtagatgggtagatggatgagagaatgaacgagtgtgagaggatggatggatgggagaatggatggacaggtggatggatggatggatggattcatgggtagatggaggatggatgagtgtgggagaatggatggatgataaatgggtgagtgtcttgatggaggggcaggtgggtgggttggtgggtggatggtgggtgagtgggtgggttggtgggtggatggtgggtgggtgggtggatggtgggtgagcgggtgtgtggtggatggtgggtgggtgggtggatggtgggtgggtggatggtgggtgagtgggtgggtggtgggtgggtgggtaggtataggtgggtgaacacagggcctcagcgggattattttgcgttggttcccggtgcagcacttaagctttccggagctccctttccaagtatttgttgtacctgtaggaggacacctagtccggctcagttctctgtaaaggacagtggggtgcagtggggagggggaggggaggcctataagagggtctcatcagttctccagccggggactggagctgggatcaagtggtgggcggaggaggggtgcaggggggaagagcagaattccagggccagaagggactccaggttgagtgggaagcccagccacccagcctggccccctctccacctccctgacggaccctctaacaaccgagctggccgctcccctccctgcccaccaccaccctccagggctcccgacgcccctgcccatccccccgcccctcccccactccaagcgctcccagcctccccctcccccggccgtgtctgtaccccgcccccctgctctccgcgggggcccgggaggagaggaggcggctccgtgctgcggggtgccggggcgcagagcccgcggcgggagctgtcagcgccgatcgtggggagggggctcctctgccccaggtcgatgggagcgggggcccaggctgcggtttacactgaatccacaaaaatcaccgaagcttgaaaagtgctcaataagccatcgatcgctctctgctgatcggtgccgccgccgcagcggggctggggggaaaggcggggcgagcagacccaggctccctgcctgtgccccacgcgggaccgcggccctgcatctgccccccacccacgcgaggctgcagccccagggcctgggcaagaggttcccatcccgcctgcaggcccgggctgcaggcctgaccacgctgaggggtggggagggagggggttagaaagaacgccccctcctctgtcctcccaaagctctctgtggccctgggactgcaaaattcttccccaggccgggcgcggtggctcacgcctgtcatccctgcactttgggaggccgacgagggtggatcgcctgaagtcaggagttccacaccagcctggccaacatggtgaaaccccggctctactaaaaatacaaaaattagcctggcgtggtggtgtgcacctgtaatcccaactactcgggaggcggaggcaggagaatcccttgaacctgggaggcagaggttgcagtgagccaagatggagatactgcactccagcctgggcaacagagcgaaactccgcctaaaaaaaaaaaatccttccccagatacttccagagatatggaattaagacaaatcctggctcattcactgtgactgctgtgtgaccttgagtgtgtttcttaacctctctgtgcctccattgccatatctgtaagatggatatggcagcacgcaccctgcctgcaattcatggcttccttagggtctcacttgtgaatctcctctggccttttggcaacttctttccttctcagctggggaagccgttttcctgcctgaaaaacctcttccccagtgcaaggcttggaggctggacacagttcggggcattcagggaactgccagcaccagtggccatgtattcgggaggaggtgagtgggaagaggtgaggccatggggtgggcagccacttgccaggggcagtgtttgttcttaattctggaggtagcagggagccatggaggatctagagcagaggtgtgacctgaatcaaatcgctccttccccagagctgagcctctgtcctgggttggcctctgtgctgatctcacctcctcttcctctccccccatggcccactggtcaccactcctggcccttctccctctgaagtctctcccattgaccccacactggctctctagggacctcccaaggccagatctgaactcggccctccctcactctaagccctcccaaagctccctgtggccaacccaagcccttggcccagtgctctacccccactctatgaacgagctgttccactgcaagtccagccacgcgccgcccagcccgccaggcccacctcccaccgcagcaccccctggctgttgtcacactcgcccgcatcccacccagcctttgcccagcagttcctctggactggaggtcgttccccaccctgcatgctggcgaaagcactcctcatccttcaagcctcttttccaggagccctcccaggcagcatctcccagagacagccccagcccgaggcctcctccgagccctgtctgcgtcttctcttgcagcccaggctgggggtgccttctggctgggggcaccttctgcctgttttgtagaaggcggaagaacgaggtattggtagcaggggctggggttggaggagcccaagagacacaaagccagaaccttcctccaactgcctggaaatctgaggccccactggtagatcttgcctcccacagctccctctggcctttcagcacagcccccaactgacacccagaaggacccccccacaccaggtcccaaggggagagagagaagagaaaaaaacagagagaaaaggcaagtgggatcagggcctccctccactacccgtttcacaagacccccccttctttctggaggcccccactctgagagtctcagctcccccacccgagccccccatctgatctgtgcaggctcaggggccgcccccactccctccctcaccctctccccaaaggtcagggagcaaatttcatccccacgtgtctctcacacctcgatgattaataattgaagaaaacgtatttctttgggggcccaggatacatcagaaataactacagaattcatatgctgccagaggcacgacacccatgggaagacagagccaggagaggggcacgggcttctgagggcccagaagctgacggcgctgcagaatgatttcaaaaccaccctaatagaatcacccatggaggacgttctcagcactgggaaggcaccgtgctgaggctttggaagccaatgacctcaccagctccattttacagatagggaaaccgaggcacagaccagggaagtgacttgctcgtggtcacacagtgggattcaagcaaagaccgtcccccacacccctttaacctgtcctcccgtcaccagtgccacacttcctgcacccaggatggcacaagggcatagaggccgggggcatggggaagctctcggtcctgcaccctgacagcctgtggcctgctcatcacagacgcgtcatccccactcacccagcatgtcttgaaattttttttttttgagacggagtctcgctctgttgcccaggctggagtatagtggcgcgatctcagctcactgcaacctccacctcctgggttcaagcaattctcctgcctc[135 bp omitted]ggcctccccaagtgctgggattacaggcgtgagccaccatgcccagtcatgtcctgaaaatcttgaggcatctaagttccgatgccttgcccaggctcgtttaatcctcacaaccacccctgctcacacaggagaagaccaaagctcagagaggtgaagccacctgcctggggtcccatgacacagggaggcaaattcaggtgtgtccttcttatgagtctgtcttatgagtcctggcattgcccctctcattggcatctttttttttttgagacagagtcttgctctgttgcctagtctggagagctctgcagcctctgcctctcgggttcaagtgattctcctgcctcaggctcctgagtagctgggattacaggtatccaccaccatgccgggctaattttttttttttttttgtatttttagtagagatggggttttgccatgttggccaagctggtctcgaactcctgatctcaagtgatccgcccgccttagcctcccaaagggctgggattacaggtgtgaaccaccatgcctggccccattggcatcttgaggctcagccccatgtgaggtgggacgggtgatgcttgaccccatatggggcctgccccaggatctacttgatggaaattgaagatgtcagaagacactgaggtgcatccaggttcagagatgtagctgctgcactagccaatgggtggaggtgcccaagcgtccatcaccagaaggatggatccacacaactcagccacaaaaaggaatgaggctctgacccaggccacagcatggatgaagcttgaggacatcacactcagtgagagatgccagacacagaaggacaaatcctgtgtcactccacgcatgaaagtgccctagagtcatcagatccagagatagaaagtaacatgggggctgggcatggtggctcatgtctgtaatcccagtgctttgggaggctaagttgggaggatggcttgaacccaggggtttgagatcggcctaggcaacgtggcgagagcctgtctctacggaacatacaaaaattagccgaacgtggtggcacctgtaatcctagcactttggaaggctgaggcaggagcatggcttgaacccgggaggcagaggttgcagtgagccaagatcgtgccactgcactccagcctgggcaacaaagtgagactctgtctcagaaaaaaaaaaaaaaaaaagcttgagatgggaaactttatttatatatgttttaacaccgtttaaaaaattttgggccaggcgtggtggctctcgtctgtaatccccgcactctggggggccgagatgggtggatcacctgaggtcaggagtttgagaccagcctgaccaacatggtgaaatcccatctctactaaaagtacaaaaattagcctggcgtggtggcgtgcgcctgtaatctaagctactcaggaggctgaggcaggagaattgcttgaacctgggaaacggaggttgcagtgagctgagattgtgccactgcactccagcctatgtgacacagcaagactttgtctcaagaaataaaataaaataaaataaaacaaaatttttcagaaagggatgaagttctgacccagaccacagcatagatgcaccttgaggacgtcacgctcagtgagagacgccagacacaaaaggacacacagtgtgtgatcctgtttctatgaaatgcccaggaaaggcccatccacagagacaggaggggatggaggggtcagaaattctagatgctttttcattcaggtgtacgtgctgggggggcctttattattcacgtgcccatcctccgcttatttcaatgtgttacccttgcccgatgctgctcttctgctgtgttccggaacaaaacgtactgggcatagctttgctacccaagcgaaggggactgagaaacagcggtggcctcctccttgggtggaatgctgggtggtcatcaaaggtgatgggggaggagacatttaaatgacacgggaagatgcccgtgagataacaggaaagacacagaccacatgagagtcagaggtcaggtgagcccattttggtaaaacccctgtctgttgtttttttaagagaccgggttggccgggcgcagtggcttacgcctggaatcccagcacttcgggaggccgaggcgagtggatcacctgaggccaggagttcgagaccagcctgatcaacacggtgaaaccccgtctctacaaaaaatacaaaagtagccaggcgtggtggcgcatgcctgtaatcccagctactcgggaggctgaggcaggaggattgcttgaacccaggagacggaggttgcagtgagccaagatggtgccattgtactgcagcctgggcaacaagagcaaagccctgtctcaaaaaaaaaaaaaaaaaaaaaagagagagagagagagagagggtcttgctctgtcacccaggctggagtgcagtgatgcaatcatagttcactgaagcctccaactcctgggctcaagagatcctcctgcctcagccttccaaagtaatgggaccatggccaggcaggtagctcatgcctgtaatcccaacactttgagaggccgaggtgggcggatcacctgaggtcaggagttcaagaccagcctgaccaacatggtgaaaccccatctctactaaaaatacaaaattaaccaggtgtggtggtgcatgcctacaatcccagctacttgggaggctgaggcaggagaattgcttgaatccagtaggtggaggttgcagtgagccaagatggtgccattgtactccagcctgggcaacaagagcgaaactccatctcaaaaaaaaaaaaaaaagaaaagaaagaaagaaaagaaaaagtaatgggaccacaggaactcaccactctggctatttttctaatttttatttttgtagagatgagatctcgccatgttgctcaggttggtcgcaaactcctggcctcaagtgatcctccgacctcagcctcccaaagtgctgtttttataggcaagagcgatggcgcccggcctcctagagctttaggagggagtatggccctgcccacaccttgatttcaaatttcaggcctctagactgtagaaaaatacatctgtggggttttttgttttgtttttagagacagggtctcattctgtcacccaggctggagtgcagtggtgcgatatcagctcactgcagccttgacctcctgggctcaagtgaccctcctacctcagcctcccaaataattgggacaaaaggcaccaccacacctggctaatttttgtatttttttgtagagatcggagtctcgctatgttgcccaggctggtctccaactcctggcctcaaataatcctcctgcttcagcctcccaaatcattgggaccaaaggcaccaccacgcctggcaaatttttgtagatatgggtggggtgggtctcgctatgttgtccggactggtctcttaactccaggcctcaagcgatcctcccgcctcggactcccacagcgctgggatcacagcctccccccgccccgaggtagcgggtggtgggaacgggattggaatcccgactgtggggcccctgcggccacctccaggatacagcggaccccgatgaagccctggcctgggtgctgggggaggctccgcggcgcggtcccgcaggcgggaggcgatgctgccgacgctattgctgccattactattacggagagatggggcggggcgggagcaccgggcccttcccggaagcccttcctgagcttattcagtgcctggggccgcggcgatcgatgacagctgggcgccggccgagccccctccgggccgcgcgggggcgcatgcgcggggccgcgggatcgatcggccgcgctcgggcctccccgcacccgcccgaccccgcccccccggctcgttgcccggcaacctctgcccggcgcgctcccattggctggcggcggcccgggccccggccgcgcgtggtcacttggtcagcgcgggctcggcgtggccgggggcctggctccgggcgcgggtcgatgccgcctcgcatctgacctttcccggcgcggggagggggcccgagaggatggagagagctggaccatcttggaagaaaactttattgacccgtctcttatcttggggacgcacggttccagcggcggggggcgagggtacggctgggtgggggcaggggcggccaggaccttcctcccggacatgcacggaccccctgaccgccgccccggccatctccctgggcgggctgctctccattccctagacaggaaaattgaggctcacgagggcccggggattacccaaggcgcaaagggtttatgaggtgcaaggggcctggagcccagagagtgtggctcgagggcttcagactctctctgccacgccgtgctgacatctgcaccctccaagcaaagctaaaacatcttcccgcgttgctgggtcccacaccgtcgcagcctggaacccaccaccccataaggagggaccgttccttaaattgaaatgcgatgttgaacagccacgaaaaaggacgaaatcgtgtcctttacagcaacatacgtgcagctggaggccattatcctaagcgaatgaaagcagaaacagaaaaccaagtacccatgttctcgcttatcagtggaggctaaacattgggtactcatggacacgaggatgggaataatagaccctgaggacttctaaatcggggaaggtgggggacaggggctgagaaactcctgggtaccatgcttagcacctggatgacgacgggatcggtcatatcccaaacctcagcatcacaccatatacccatggaacaaacccgcatatgtactcctgaat[138 bp omitted]cttggagaaaccccgtctctactaaaagtacaaaaattagccgggcatggtggtgaatgcctgtagtcccagctactcgggaggctgaggcaggagaatcgcttgaacccagcagacggaggttgcagtgagctgagatcgcaccactgcactcctgcctgagcgacagagcaaga[134 bp omitted]aacagagcgagaccccatctctaaaaaataatatatatatttttttgagatggagtttagctttgtcgcccaggctggagtgcagtggtgcgatcttggctcactgcaacctccacctcctgggttcaagcaattatcctgcctcagcctcccaagtagctgggactacaggcacgcaccaccatgtcccactaatttttgtatttttagtagagacggagtttggccata[136 bp omitted]tgaaattaaaaggcttaggaacagtgtgagatcttcatgtccaaacgaaactcccattacacagaggccctgtgaggggaagccccaagtcaaggtcacagacttgagaaaagcttatggttattttgaaggggatatgggtagtgccctaaacattccaatttagtaaaaaaaaaaaaaaaaaaaatcgcaaatcccccaacaaccacttgggctcattcaaatgaacacctggactttgtcaaaagaagagttattgtcagaataaagacgctgcttataaaatgctagggttccctgtgtggagccaagaagatttcttctttctttaagggtgaaaaacaagattggcttatttgacagatctgtgcatttttttttttttgagacggagtctcgttctgttgtccagactagtgtgcagtggtgtgatctctgctcactgcaacctccacctcccgtgtacaagcgattctcctgcctcaacctcctaagtagctgggattacgggcacatgccaccacacctggctaatttctgtatttttagtagagacagggttttgccatgttagtcagtatggtctcgaactcctgacctcatgatccgctcactttggcctcccaaagtgctgggattacaggcatgagccaccgcgcctggccgtaaatgttttaatatttagcacgcatgatgcttttgatatacgtgccatgccaagtccagggctcagagatttgtttaaaggtctccattaatcccacatgtaccccaaatcgctgtggttttagaaaagaaaaccttctgtgcaactccgtaaccaccttaaaggaaatacaaaaggagaaaatcgctggccgtagccttctccaccccctaaactcagccctggccactttgctcaggcctcccagcttctgtgtcctgcacgtaagcctcggtcttcacacagtccctgatatctgcatttatttcatatttttcccataacgttccacctgacatctccatctccttcctctgccgctgcgtttctaattcctaacagctgaggaaggttgcattgaccggcggattgtgtggggtgatttttgaaagcagatcctggaattcaatttttattttaacctggttattgagtggggagggagagggaggcggaggttggccgattcgtgtgcaagatgaaaaagctggattttcacaaaggttgtgctgtttggaaatggctggttaggttttcaacgtaggaatggttcaacgacagccctacgagagtgtgcgcgagcgtgcgtggctccgtgtggtttcgtgtgtgtgtgtgtgtaagtgagctgcagggtgtgtggacaagtgtgttgtgtgaatgtgcatgtgtgggttcgtgtgtgctcctgtgtgttcccgtgtgtgcatgttgtgttcctgcatgtacatgtgtggcttcgtgtgtgtgcgtgtgtggttttgtgtgtgtgcatgtgtgtgcgcctgtgcgtgttcgtgtgtgtttgtgtgtgtgcatgcgtgtgagagggtgcactcagcggctgtgcctttgtacacgtgtgaatgtgggtgtgagtgtgtaagtgctttgtgtgagcatgtggggggaaggacgcagaggcacgccagcgtctgactgtgtgtattgttaagagtgttgtggggtacacgtgtgtatgtgagctcgtgagggtgtgcaagggatacacgcgtgttgtgtgtatatgtgtatgtgcatgtgtgtgtgcaggtgtgtacatattagtatgtgcagatcagtgcatacctacgtgtgtgttcctgtgtgcagatgtgcggccatttgagggtggcagtgcgcctgtgtgagtaggtacctaggacagcgtgcctgtgcatttgtatgtgagtgtgtgtgctgtttttgcacgcatgcaccggtgtgagggtgtgtgtgtatcggtgcacatctatgagcatgtcagtgtgtgtgagtggcagaaggtacacgggtgtgtacgtgcgtgtgtatacctgttcgtgtacctggcagtgtgtgggcatgtgcgggtgtgagggtgtgtgtgccggtgcacaccagtgtctgcacctgcgaccaccccgaccccgtgcccagccccctgaccctctcctgctgttctcactgcggggaaacgggtccaaccccaccactgaccccagctcatctcaggcctcccgtccacagccacttcctcaggagccctcctggacccgccagcccgggtctgaccccggtatcagcccgaggggcctcgtcttgaacggaggagccgctggttccactcatgcatttatttcataaatgttggcctcccgggagctccataatggcagaggcctgtccgccttgagcaggggtccctccccagagcctgggattaaagaagagaacccagtggtcctaggtgcgccgtgagaacatcaaacatcggccagggctgcacacgggaggccctcgggggtgcagcgtggaagccccctggacagatggagaagctgaggccctgtcaacaggtcccccgcgtcctccccggccctgtgttgatgggcggcagctgtgtccaggcacgctgtccccgttggacatggccggacgcatggatttccgaagccatctctccatctggcagctttattaacccaattccagggatcgagtgattgacgtgtttgcttatcggctcctcctgtctctccagggacgggtgcccaggtgcccccaccccacctccatcggcccagggggagaggggacaccagatcccccccacagccccgagaccaacgcgcgcacgcacacacacacacacactcacagtgactcccgctcaggggctcttggtggctggatcaattcaagtggatctttggagaacatgatgggccaatgtctaacaaaatttaaaatgtgaactcaggccaggagtggtggctcacgcctgtaatcccagcattttgggaggccg[134 bp omitted]gaggcaggaggatcccttgaaactgggaggcagaggttgcagtgagctgagatctcgccacttcactccagcctgggcaacaagagaaaaactccatctcaaaagaaagaaaaaaagaaaaaaaaattagccaggtgtggtggtgagcacctgtggtcccagctatggaggaggctgaggtgggaggattgcttgactctgggaggttgaggctgcagtgtgctgacactgcgtcactgcactccagcctgggagacagagcaagaccctgtctcaaaaaaaaaaaaaaaaaaaaagccagacacggtggctcacacctgtaaatcccagcagtgtgggaggctgaggcaggtggttcacctgaggtcaggagtttgatactagcctggccaacatggtgaaaccccatgtctactaaaaatattttaaaaattagctgggtgtggtggcaggcacctgtaatcccagctactcaggaggctcagacaggagaatcgcttgaacccaggagacgggggttgcagtgagccgacatcacaccattgcactccagcctgggcaacaaacgtgaaactctgtctaaaaaaaaaaaaagctgggtgcaattgctcatgcctgtaatcccagcactttgggaggctgaggtaggcagatcacaaggtcaggagtttgagaccagcctggccaacatagtgaaaccccatttctactaaaaatacaaaaattagccgggtgtggtggcgagcgcctgtaatcccagctacgtgggaggctgaggcaggagaattgcttgaacccgggaggcagaggttgcagtgagccgagattgtgccattacactccagctctgggtgacagagcaagactccgtctgaggaaaaacaaaaacaaaaacaaaaacaaaaacctttctagatatattcattgaaaaggctaggtgcccccaaatgagttggcaacttgtgtccacacaaaaccctgcacacgaaagcttatggcagctttattcatagctggccaaatcaggaagcaaccaagcttcccttgagcaggtgaacgtatcagtgggctgtggtgtattcagacagaggaggatcattcagtgctggaggaatggcatgtccagccttggaaaatatggaaaggagggtaggagtggggagggatgaaaaactacccaccgaagctgggcgcggtggctcacacctgtgatcccagcactttcggtggccaaggtgggaggatcacctgaggccaggagctccagaccagcctggccaacaaggtgaaagcccgtctctactaaaaatataaaaattagccgggcgtggtggcgggcgcctgtaatcccagctactcgggagtctgaggcaggagaatcgcttgaaccccagaggcggaggttgcagtgagccgagattgcaccactgcactccagcctgggtgacagagggacatttgtctttaaaaaaaaacaaaaaaaaaagctacatgctgaacagtgagtagagactggtcacattaagtcagagtatgtctctaagtatatacagatacttttttttttttttccccttgagacagagtcttgctctgtcacccaggctggagtgcagtggcgcgatctcggctcactgtaacctccgccttctgggttcaagcgattctcctgtctcagcctcccgagtagctgggattacaggtgtccaccaccacgcccggctaatttttgtatttttagtagagatggggtttcaccgtgttggcgaggctggtcttgaactcctgacctcagatgatccacctgccaggccctcccaaagtgcaaggattacaggcgtgagccaccgtgcccggccacggatactcttcatggtgtgtatcatgaggccctaggacagataatgaaggcttccacgtccaagggcacagggtggcacgggaagggttgaggtgggcatttatttttttgctgtttccatgtaagttttgtttctcccacgtatatatgtatattacttgctcaaaaacagattgcaaatgtgacaaaaattacagatacctattttgtagttcagcttttctgaggttcgcaggacaggggacgcccctcccacagcccagctcctctgcagatggctctgatctgacttccccagggacccagggcttttctcccgtgatccctgctcctggcctccagttcccgaaactcaccagctctgagcaggtaggaaaaagtggcttgtgtctacagagcccagt[143 bp omitted]agaaaccccgtctctactaaaaatacaaaattagccaggcatgctggctcatgcctgtaatctcagctactcaggaggctgaggcaggagaatcgcttgaacctgggaggcggaggttgctgtgagctgagatcgtgtcatttgcactccagcctgggtaacaacagtgaaactccgtctcaaaaaaaaaaaaaaatccactccaggctggacatggtggagggcacctgtagtcccagctactcgggaggccgaggcaggaggatctcttgaacccaggaggtcgaggctgcagtgagccaattctcctgtctcagcctccctagtagctgggattacaggtgccctccaccactacactccaccctggacaacagagtgagaccctgcctcaaaaaacaaaaaaaacaaaacaaataaaaaaacaatgcagtcctaccccttgcctggctgcccctgactcttaagggaatgatgacacctccccgccaggcccacagacgctgccgacccagcccctcctcacctcaatgctctcctaacccccaagcctttgcctgcttttcctacttctcttcactgaatgaactcctgcacctcctacgcctttcggggcaacggtgcccttctcaactcaggctcccagacccgctgtcagccatggtttaaagtctgccactggccgggcacagtggctcatgcctgtaatcccagcactttgggaggtcaaggtggaggaccacttgaggccaggagttcaagaccagcccgggcaatataaaattcgctgagcatggcggtgcaagcctgtagtcccagctactcaggagctgagtggggaggatggcttgagcccaggagttcgaggctgcagtaagctatgattgcaccactgcactccagcctgggtaacagagcaagaccctgtctctaaaaaaataaagtcagccaccaccctcacactgtgagcctctcccatcaccacagggccttccatggccagctccaggcctggcatcagcgggtgcaggaaaagctcagtggagcgattccacatctagggctcggcttgtaaaattaaaataagtggagacccccccacaacccccagccacacgcaggcagtaggaacccgggagatgggacgagcgccgaagggttattagcagatgcctcgagccccctcgagccccgcagagtgggggaggatggcggaggcccttttaaggacccagtatcaccgtcctttctcggccagccgggcacccacccacctgagtgagcctggagcagcccattaagcgatttttttcctccacttacggttggcagcatcgacaagcatgctcgatatctgacgaggtgctggccttggaagagagcgagccgcctcgataaactattccctcttgtcagcgcctcctcccgcacccagcccggagcttcgcgtttgatcccctcccctaatgagctcggttttctcccctccaggcggatgagacgctccccccaccctcgcccgctcagcctttcaagttcagctgggctgagattcaaggtgggggcggcggtggtggaaggaaaaccatttccaggttccgatggggtcacctcccccaggaagtcctcccagaatttctgcagctcagatggtctcgtgcatttgtggggagggtctggggtacagaaagagactgggacctagatatggggggtcgtacagcagtgtccaggtgccacgattgtcatctgtccattcattcaacaaagggtttgggggtgcagagctgggcacaggtgctcccagctgaggactgtgccaacgtgaggggctgggcaggatggggcaggggcccaggaggcggcagagcagcagagaccctcaagaggggacgatgacagcctgatgaacggacacagagttggccaaaccgggcttggtcagcctgcctggaggtgggggagagagtctgaaccccacccggggaggggcaggcaggtggcagggttgggagaagcccccttcccagaccagagaccctccagtctggcttcagcaccaagaacagctccctgcctcttcctctctggagctccagagggacccccatttgtcagatgtcccccagtcgtcgcccagatggaccagcttcttcctgccgaggccttcagggcctcccaggacctccctgggctctagtattttcaataaaataggaatcgtgccgcaacctcagggggtgggcacgcacagacatcaatgttgtttgcagacaatgagtcactggacactggccgatttttctcagcatctccaatatt[134 bp omitted]accctgtctctgcaaaaatttaaaaattagctgggtgtggtggtgaatgcctgtagttccagctactcaggaggctgagg[131 bp omitted]caataaatcatttcaaaatttaaaatcagatccaaccccctagttttattaaaatggaacctgaggcctgagaagaattatgcccctcccaccagccagattccagaatcttctctccaggatgaagggcctcatgggcaagaggaggccaggagggaagggggcttccaaggaagacttccacccaccaaaaggagccccagtcaggcgcggcagctcacgcctgtaattccagcactttgggagtccaaggcaggcggatcacctgaggtcaggagttcgaaactagcctggcaagcatggacaaaccccgtctctactaaaaatacaaaaaattagctgggcgtggtcgcaggcgcttgtaatcccagctactctggaggctgaggcaggagaatcgcttgaacccgggaggcagaggttgtggtgagctgagatcgtgccattgcactccagcctgggcaacaagagtgaaacttcgtctcaaaaaaataaaaaaaaggagccccatccattctccaaattataatggtgcactgtgcagggtgttgctgaggtcctggaagagagccagagcccccaggaagcccccccagggtcagggaagacaagggacccagaactgggccagagggagagacctgagtctaggggaagaggaagtaaaggccctgcggtagagtgggcattgaagctgggttctgcaggtagagtaggagtttcttagcaagagctaggagaacatggcccatgtggacagagtcgagaggggctgacacctgggctcaggttgggggatgccacctcctcagaggggactgtaatggtggatctggaagacccaggcttggagccaggctggtgagcccggctcacagcccaaggtttgctggggcctcagccaggactaggagcaggtggtggcagttggaggtgggctggaggagccgggcctgcccagagggacccaggcacccacggggcgagcggcgagggaggcagaaagcaaagcctcaccaacccccccctccactcaccagacatcaaacccagcctccccacctttcgaggttattaatttttcagagaagaaaatgctttttgtattttttccaggcaaaatattgataatgggcttaatgtggccttcctgcttttgtgtgtcgggagagagagcttttctgtcctggccgctgcagaagctgttcgcccccctccagcccccgcagcctccatcggcagaccccatgcacttggccgctgaagcccaggcagggagtgggggcgcgttttgatcgccaccgagcgggttggtgcagcccccctccccatctcgagccctcctacctccgcctgcacaaagccggacgcctgcccgccccaccgtgggtcgatgcaccctgccaggggagctggtgtttcccgcggctccaggctgatacatctttgagttgtttgaaattttgcttcctttctctcatggcgacggggaggcaggaaggcaggggcctctgtgcattcactccttcattcatgcattcattcattcactcactcactcacccagcccccagtcaccatgcacctgctgtgccccaggctctgtgctggatgctggggccaccggccgggacagatcgggcccctgcctcctcaaagttcatagtccaggagagagaagaataggtacaaagccaaaaacttccaggagaaaatatggcattacggacggtgatgagaaccctgtaagacagacacaggaggcctggtgcagtggctcacacctgtaatcccagcactttgggaggccaaagcgggcagatcatgaggtcaggagtttgagaccagcctaaccaacatggcaaaacccagtctctactaaaaatacaaaaattagctgggcatggtggcaggcatctgtaatcccagctactcaggaggctgaggcaggagaatcgcttgaacccaggaggcggaggtggcagtgagccaagatcgtgccactgcactctagcctgggcgacagagtgagactcggtcaaaaaaaaaaaacagacacaggagagagaaactgtgacacaggggagagccaatggaggctggggtctcagggagggcttccctgaggcagtgacctcagctgagacctacagaatgaggatgaggccgggtgcggtggctcatgcctgtgagcctggcactttgggaggccgaggtgggaggatcatttgaggccgggagtttgagaccaacctgcacaacattgtgaaaccctttccgtataaaaaatagaaaaaaaatagccaggcatggtggtgtgtgcctgtggtcccagccacgcaggaggctgaagtgggaggatcgcctgagcccagaaggtcaaggctgcagtaagctgtgatggcaccactgcactccagcctgggcaacatagcgagatggtgtctctacaaaaatttttaaaattaggccgggcgcggtg[168 bp omitted]gaggcaggagaatggcgtgaacccgggggggtggagcttacagtgagccgagattgccccactgcactgcagcctgggggacagagtgagactctgtctcagaaaaaaaaaaaaaaaaagaaggataagaggcctcagtgagatggggcagcgaggacctgcccttcctgggggggaacagcctgtgtgaaggcccagaggcgtgaggtagcagaacctgcccattcagtggttttcagacctgaacgtgcagcaggacccccgggggcctcattgaagcccagattcccgctccctcccatatccagaagccccccacattggcaggccctcattcagagaagctggggttgcagaatttgcacttctcacaagttctcgggtcacactgatgctcttggcccggggccctcactccgagaaccacagactcaggggctttgtgagatgaagacaccggccaaccctcgaccccaaggagcaggcaaggggtgggggccagagccggacaaccccagagccctcacttaccctctgggttctctaggagaattcccttgaaactccggtccttgatttccccatctggaaagcgggtgcttgataagtttcctggtttcctgtggctggtgaaggcacgaaccaagacgacacaggtagggtggttaatgcagagcctggcccacagcaagtgtttaataaatgtaagcagtgactgtgagcgctgatgaaggctgtgtatgggattgatgaaggggcaagaggccttcaccaggctggtggccggtgaaaatgcagaaactggatgggcgtggtggctcacacctgctacatgagcactttgggaggccatggcaggagaatcacttgagcccaggagtttgagaccagcctgggtaacatacccagatcccccatctctacaaaaaataaaaacttgccggctgcagtggctcacgcttgtaatcccagcactttggtaggatgaggcgggcggattacttgatgccaggagttcgagaccagcctggccaacgtggtgaaatcctgtctctactaaaaatacaaaagctagttgggcatggtggcacgcacctgtaatcccagctactctggaggctgaggcatgaaaattgctggaacccaggaggtggaagttgcagtgagccgagatcgtgccactgcactccagactgggtgtcagagcaagactgtgtctcagaaacaaaaacaaaaacaaaggcgggcgcggtggctcacacctgtaatcccagaactttgggaggcagaggcgggcagatcacaaggtcaggagattgagaccatcctggctaacacggtgaaaccccgtctctactaaaaatataaaaacttagccaggcagggtggtgggtgcctgtagtcccagctacttgggaggctgaggcag[137 bp omitted]tggtatatgcctgggaagtttgcttgagcccaggatgtcaagtccgcagtgagctatgatggcattgttgcactccaggctgggtgacagagcaagatcctgtctctaaataaataatgcagaaaccaagggcatggcacccatgaatgtgctagctgcagctgcgtaacaaatcactccaagtttaccagcttacagcaacacgcaggcactgtctcccggcttccgtggctcaggagtggcttgactgggtcctctttccaccttctcccacggtgccgatcaaggtgctggctgcgttgagctccttcctgaagttgaaagtccttgaccaaactcctgtggttgtcagaggaatgcgagtccttgaggttgtgggactgaagtccctgatttgttttattttggtagagaaggggtctcactatgttgcccaggctggtgtcaaactcctgggctcaagtgatcctcccacctcaaccttgttttcttcctgactgtcagagttcacccacccaccgttccctgcctggcctcttccagggaccaggagagaaggttctcagtttgctaaatggaggctttttttattttgagacagagtctcactctgttgccctggctggagtgcaatggtgcgatcatagctcacgacagcgattctcctgcctcagcttcttgaatcactgggatgacaggtgtgtgagccactgtgcccaactccagagtggagtcttatacaacacaagttatcgtggtggtgacacctaacacctttgccctattctgttggctacacggaagtcacaagcccaggcctcacttaaggggaagggatttgcaggatgaaaca[180 bp omitted]catg[137 bp omitted]gcccggccactggggccactttctatcaaccacacctggctcgggcatgcacctgccctcccccatgcatacaggcccacatccatgccttcaaatggccacaaaagtgtgcgtggccatagacatacatacttgcaagtgtttctctttttgtgttttgttttttgttttttttgagacggagtcttgctctgtcacccaggctggagtgcaatggcacaatcgcagctcactgcaacctccgcctcctgggttcaactgattctcctgcctcagcctcctgagtagctgggattacaggtgcgtgccaccacacctggctaatttttgtatttttagtagagacagggtttcaccatgttggtcaggctggtctcaaacccctgacctcgtgatcctcccgcctcagcctcccaaagtgctgggatgacaggcatgagccaccatacccggccagtgtttctctttttgcattgcccactgggaagctcagagacaaaattatggcctgtgtgtagcaaaggttcagaaccacctattgtgacttctcttccagcgacatctctcgaccttggttgtaattcattttctctggctgccttgtctgtttgcaattctttcctccccagtctttctgggcccatagaggctgacaatggcagcggcttctgtctgctcagcatctgagtgcagttctaaggaccttataagaattttctcattttatgctttcaagaaatctcctcctacagaggagggatctgccacacagagaggtcgtgagagccaccccaaggacaccagctgggagatgggagagctgggatgagaacctggactcaatccccagcgggcagatttttttttctttttagacggagtctcgctctgtcgccaggctggagtgcagtggtgcaatctcggctgactgcaacctccaactccctgcttcaagtgattctcctgcctcagcctcatgagtagctgggattacaggcatgtgccaccacacccagctaatttttgtatttttagtagagatggggtttcaccacgttggccaggatggtctcaaactcctgaccttgtgatccaccagcgggcagatttgagagctgggctacacactgacatgctttacatgcagagtgaccaagccaggagaatccaccagcaggggactgtggcgtcgcaaccccctccctggggtcgcaacctcctccccggggtctcagcccaagctttgaatgtgggctgccactggcataaataatcgtttataggccgggcacggtggctcacgcctgtcatcccaacactttgggaggccgaggcgggtgcatcacgaggtcaggagttcaagaccagcctggccaagatggtgaaaccccatctctactaaaaatacaacaattagccgggtgtggtggcggacgcctgtaatcccagctactcgggaggctgaggcaggagaatcacttgaacccaggaagtggaggtttcagtgagccaagattgcatcactgcactccagcctgggcaacggagcaagactccgtctcaaaaaaaaaaaaaaaatcgtttacaaatgtgttccaccacacattgatcccccacgagagaaagtgctgcttcagggaattctccctcgagtggcgtccccaggccggcccagctgcacccaacgaagtccacacgccaggcctgtccaggagccccttttggccactggacaagggtctggctgggccctacagccctcccagatctgatcccccaacaaagggaagaccaggatccagcgccacggtgccttcatgagctagacaggccctgagtcccgtgctccggattccactgaacagaactctcgtgcacgtttccccacggcgtgccccccagccggagccgggtgatggggacatcatcacaaactctgtgccctccaagggctcccaggcttggagagggagacaacagaaaaaggagcccgccatgctggcagcagggggcacacagtaggtccgcagcaggggaacaggaggacggattttacaggaccgggcaggggcacagtagggccctgttggccataccgacctctgactcctagttccccgccgaagccacctctttgcagctttgtgcccggggtcctccttgcacacctgggttttcctcgggccgccctccgggtagaacagctgacgtggatgagcgctgaccacgtaccagggcccgggccaagcatgcgacttacatctattcaataagtcaacgtggtccccattttacagatggagaaactgaggcacggcgagtgacttgagctgcccagggcccgtcagcaggggaaggggtgccagctgaactcgggagctctggcctgtcccgtggtgagccccacggcctgagtccacatcccagttctgccctttttaaggttcagggagctgcggcctcagtttgctcactcacaaaatgggaacgagtgtccggaagggatggaagggcacatgaacagaggcccccattctgaccattcttttttttttttttttttgagacggagtcttgctctgtcacccaggctggagggcagtggcgcgatctcggctcactgcaagctccgcctctcgggttcacgccattctcctgcctcagc[131 bp omitted]cagcctcccaaagtgctgggattacaggtgtcagccactgcaccccgcctgacgattcttaaagaagcaaaatccaggcccccaccccagcccggccccacaccagctggctcccaggaggcctgggctctgcctcgagcaccccattcactcctctcctgcagccccagcatttctacccattgagaggaatcaaaaaacagccccagccccaggaaggtggaaggaacagaaaaccagggctggtgcccacagggaaactggaacaaacccataaaactgaggctggtgaaccccaggccacctaactccaactgcacgggagccccggtaccatctccccagaatccgcccctcaggcctcagtttgctcacctgtgaagtggggcctgcaccgcccagctcaagggactatgagggaatctgcgcagatggggacaaagcagcctcccttcgctttgtgcaaacctctcctccttgccccggcctcctcctggcctccagagcagagctggcccccgactccagctcccccaggatcgatgggaggatcaattccagcagcagcaccgggctgtggggggaggggggctcctctgggaagcctccagttcccctcctccctccccctcctttcctcccccctccccttcctcccctttctcaccctcctcccatctcccctctgcttcctccccctcctcctcttcctccccctcctccccatcccttcttcctcatccttttccctcacctccccctccctcctcctcttcccccctccagcttctgtcctctgagcctggcccaggattccttgcccctcccccaccggtccaccctggctgtttatggggtgggcagaggctggtggccgcccttgtcacagcctttcctgagcactgtcagatgtcctcaagggtgcactgtgtgtgttttatccccattccacagatggggaaactgaggctccagaagggtccctgatgtgggaaatgaaggcggggctgggatttgagtctggaacccaccctcaaccccaaaggggagaagccccggacaccacgcaggcgctttgggaatgaggcacccttggcggatggactgggcgggctggggtcagaggtcacctgccctgcccagcagccgcatggagatcacccagtagccctcaggagtcggggctcccacttgtgaaccgggtacgccacccctggagatgcagagctggctggacacgcacctacctccatcttctattcccctctgagagctgggggcgggtggttctttggtttttctccagggaatgagaggcgccctctctggggggtaagagccttggatctgcctgtttcctcatcggtaaaagcaaggggtcaacaggatgaccccatccctccccaatccccttctcttcttgccggcgctatgacccctggggagcccctgcccccaggcctggcagcccccagggaccctcctactggggcctgccacggtggggggacaatgtttcccattttctgcggagccccccaactctcacctccaggcagaggtgaggtgatgaggggctggaggaggctccccctccaattccatccttgggaaatgccaccctctcacctcctggcgcccagggagttcagtaataacagaaacgttttgtttggttttgcttaaagcgagcaggagggagagcgcgaagccaacggctcctgcccagcccaattgtggggatttaccatggaggcgattactgagcggaactgcgggcggctctgctcggagggtcccgtgcttgttagggaggtgggagaaacagcaattacagctgttagcaccgaggggaggggaggagggggaaggagaaacggaggaagcagaggagaggggagcagggagaaggaagaaggaagagtggatgggggagggagaggaggctggaagggaggaggggagggctggaaggagaagggggagtagaaggaaggaaagggaggagccaggagggagactaggaatgggaggaggggggaagagggagaggaggagggggaaggaggggggaagggggaaggaaagtagaggagggggtaggaggagtgggaagaatggggaaggatggggaggagggagaagggggagtagaagggggaaggatggggagggaggggagaggaggagtgggaagaatggggaaggatggggaggaggggcaggaagggggaggagggagaggaggaggaggatggaggaggagtggggaggaagagggagggtgaggaggagggagaggaggaaggaaatggaggaggagtggggaggaagggggaggatgggggaggagggagaggaggagggagatggaggaggagggggaggaagggggaggatggggaggagggagaggaggaggaggatggaggaggagggggaggacgaggtaggaggatcctcacccttcaagagcatcaagttttcctccccagtgggagaagctgaggcccagagagaagtctctgctctgacaccccacaagagctttcccaaccaacaggcccctctgggactccctctatgccctgcccagggccccacagggctcgctctgcttcctgctctcttgctgcaggcctggagctgggaggtgggcaggtgatggccagagcaggaggcggctggccccttcccctgtccgctgcctcaaatgattaaccagtgcggctggagtgaggagtggacactgggagccggttcctcaaataccctccacacctttgaccggcgcatgggccagaacgggggacccctccagctcaggctgaagagctcccccaactgccgggtccagagggtcctgcgctccctgggatcgcccgaagggctgggtcggagggggaccctggcgcagggaacgttctctgtaactgagatccgcgtttctactcaggagctcagctgagactctctgcgtggccaaccctctccagagaccggctccaccgccagccagattggatgctgagcgtgtccacacagcacgcactcactgggactcagcgtgctgggactcagctccccgccgcccagtccctcgggcctaggtcagctcgccagctggtggcctgaggcagatctcaggacctccctgtgcctcagtttcctcacctgaaaaatgggaataattggagttgcttcctcagagtacccctgcccctagctccctgcaggtacagtggggatggggcaggagatagagcggggacctgcaggacgtacccctcccccagggaatgggggacgccaccccacccctggcgagcccggaaggtggctgctgattgaacaatgggagaaacaagctttcttctagcgcaaggtgactcacctgctggcccagggacaaagctcccccagccactccccaccgcccgccaccccccaccgcccgccacacacacacacacacacacatacacacacacacaccgcacagcacggagagggggtgagtcattccaccccaccacatctgtgatggcctccctgggtgcgtactaacctgtggggtggggggattatactaagggccgcccgggaccctccctgcttggcctcacagccagggagagaaggcccaaccacccccagcctggcattcaaggcctggctttgaacacatgccccccccccacacaccccagcttcattcagttttatctcattgactcattcaacaaacattccctaatgaagtcctgtgagggccccgaaactgggctaacgccagacgcctccccagccccaccgcctcttcctcagatgacaaggagtcttttcgtccttccattggcctacctgacttggactcctacacatcctacaaaacccaacctcagggctcctcctccaggaagggaggactgccgcctccccagttctgatctcagggggatggggatgacttttcccctccctaagtatgggagccccagcgggagggacagaggctgtggccgcagctctagggtggtgggggcaggggagcaggagtgatctgagaagtttgctaaatccagcgaatggcctggttcccctcccccatccccggtctgcagattctgcctaaggaggtgcgaatcccttcccctttccccattccccattccccagtccaacaccccctccccacccagaggtccacgaggcgagacagacccaaagagagaggcaaggacgtgggcgttggtcggtcttgcggggaggaggtgccgtgctctccccacttcctgacccagcagaaagcgcccgggcgtgtccagataaaccgcgccttaatcgaggcgccattccggcccggaacaggccaggcccaggtgaggctcagagccagatgcgcccagcctaacccacctggggacgcccctcggaccctcccggggcggggtcctcactcccgaccaggacctctgtctctgcatctgcgaagtgggcgcccccaggcctgtgctccccccacccacctgtcgtctcgtctcggctttcagggtgcagagtggacactcccaggtgtccaagccggcgagctcgggtcccgcagaaccggcggccctggagacgccccgagggcagccccgctgcagccttgctcgggtcccctagcccggcgcctccgcaaaccaacccaccgcgggccgccgagccccgctccgggatccgccggctgcctccatcccagaagagtgcgcagagaattaaatctagatatttacatgtttaatggctaaaggagcctgtcttctggcagggcagggagggcgctcaggtggtttaactcagcgccgggatcccgctcagctgcgggggccgcgaaccccgccgctgggccgacgattgggcccctccggagcgcggcgcccaacgcgggtttcgttgcgtcggggaagtccgtggcctgcagcgtccagtccccaggctgtcagccgagccctggagtggggcgttctccaggcccccaacccctgatccaggccgttcccctcccgcgcaccctccggcgggggctgcagcccgcgcccctcgccgccaagccccattttcccacagtgcaaactgcagcaaacgaactggttttctcctgagcgcacgctgcggggagacgattccaacggcgtccagtgaggaggggcccaggcctgcgagacggggcgcgttcctgtccccagacccctccggctgcgcctcaacccccagcccggctctctgacctgcatcggtcgggccgggcacagaggaggcaaagcaggcggaggccgcgagaggagagcagcctgacctcccgcctgagcccggacccttcccctcgggcaccctcggacgcccccgccccagcgtgttactttctagatggggaaactgaggcgcggccagggcgatgcggcggaagtcccgcgcccggccgtctcccgcgcctgccagacagagccccgagaagagggcatagaattccctcctctaattgtgtcccagaactctgggacgacggaggccaagctgctgagggaggggacgaggacgcggggccccagggaccaacccctccgctccccggccagccgcggccgcccagcctcggtgccccggcgcaaacaagcgcggtgtttgccgagcgcgaggcgggcggcgcggcccgagagcgatgaggattcgatggagccgctcgccgcggcgggggcaacggagcccgggcgggcgcggggatcgatcgggcacagctgtcgcctaagagcccgcgggagcatccacccgcgggccagagctgcccgggcgccccgcaactgcgggcaggaaatccgggacgtcgggcccgccaggggcgaaaccccaaagtcgcgacacccggggtggggaggtcaggacgtccccacggccaacgtggaaccttcgggagccgcgcgctcagcctcgccgggacccccgccaggccgtaaaagcccagagtctccccccaaatctaaataaaatccccagaccccgcccgaacgaaggcggctggagtccagagggagaactcctgccacacactaggcaccggcggccgggatttggggcgcccgcaggtttcgggggccgggagtgggagcagagcggatctagggctgcggctgggcttgggtggggcgcgcattcattgccatcgtttagtaaaacctcgctttaataaaagcagggaggggtgcgcagagcccggacactttcatttcggtgggagacaaatcgaatcagaaagtcagttgggggcgcactgtgcagggttctgggggagccccaggaaaggaaaacttgaggtatctgactctgcctttgatatttttagctgcaatgggagagtcaataacaacagggaaggtggtgtgtccaaaaatgggggaggtgtggaggattaaagagggggttcaagcttagggggtccgtttagggagtttgaagccgtggagagtgcgcacccctggggcatgggtggaggcccccagtcctcccctccacccgcgggactctccaagccctgaggttggcaggaccagaggctgccctttttgactcctcccagacgcaggccaggcacagagagggtgagcgttggtctggggcagcccagcacctgctgaggtccccctccccaactcccagacacagactcgggctctgggagtcaaactttcatcttcctggaggggatactgaggccagagagcttcctcgaggtggctgaggtccctgtggggtggggaagggggacttcttgtcccgatccagcccacccctccccctgcccacaatttgcctaatgacccaggatcgatctgggcctgggcagccagcctacccggtggccggctcaattctattttactaattactaaaaggctgctgctggtggggagaagcaagctgggggctccagggggccacagtccctctcttggggccagcaaaattctgttcaatctctcaacgggaccacagcctctacaaggagtgagatccccatccctgggggagtccaagtgtccatcagccgaagggaggggtgaggggcttcgcagacctggatagggttaggtccaccaggctgggctgccccttccaagtctagggagctttggaaggggtctgtggccaccttagcgtgtcctgaggcagcagaggggagaggccctcttcctctcggagtccctgaccctcgtcttctctttcaaaatggatgctttccctgctagaaaagccacacacgcttgctattaaaatgaacacgatcatcaagctgtaaaaaatatatttaaaaggaagcctgcaaaatcccagctccctaggagctcccccacattggcatttgggggaacttccttccaccttgttatcctcccacccgtagagacccccagcccccacctggtctgcgcttcttgagcctgggatgctagcgttttatggcggctgattgatttttagatctcacgattatttttaattatctgtgattgttggagggtgagaatgaggagcgcaggctggggctctgtgcagccacatcccccccgccgagattcagcatctgcacggggagtggggtacgcgactgttcggacctgcccctctcttcccacctggaagatgggtgtaattatgtaaactccagaaattatacctgaaccctggaactggaaagtttagggaccgacacttcagggggcaggagttagcacttgggcagatgtaggaatgaaggggggaactctagggccaccacccccccaccttgggccagagacacccggaaaaattgtgatttgacttccccctctctggggctgagagaggagagtatgcctggtaaataacaggcacttactaaatgccgagccctaagcagcgagtactaacaggggtccccttcagccctatccctccccaggacttggatcaggccacctcaggctgggggcccagatcattcaggccccctctctctctggctgttgtggtcagcatagactcacctccggctcccagctgggcaggctggagggcaccccctcccacaccagagaaggggaaactgaggcacagaaagggccctattccagagccaacctagtcttggttcagaaaatcgcatctccaatgtgtagccacgtctacaggggccaggaaatctggatgcaggtgcaaagctggggccggggtttgcccagaaggtttgcaccaaaggggaagtgacagcctgactgtgtcctcccctcttccttcagctttgagccctgatgcaaccctctgagatgggggtaactgggggctcccgcgaaccgactgcctgacccatccccttcctcttctagaaagtgcacaagcgttaccccgggggtggggggggcagaggcaacggggaagcaggaaggggctgaggctggttttggactctgcaccgtagcctctggcctacaagacagagcatcctctagattctggtctggcccctccagatccgcagccctgaccttaccccactggcgggatctagtcccctgggggtctctctgattataggagcccttcccccatctatcccagttcccaggggcccctggggctcacctgtctccaggtgctgagaaaaaggagacccctgcctccccccacattgaagagaagccccagggacaaagaggagtttgcaccagcgacgtctcagaagacaggggatccagcctcagcctccgtgggctggagggtgacaggggctcttagtggtcacccccaggctccagtgcctccagcggccgcactgtaaaaaggccctgcaattagaaggggcctttggcaaccccgaggccgggcagcccattgtacagttggggaaacggaggcccaggtgcccacacatgggcagaggctgacccctggggcgcacggaggccctgacctagccttaggacctcccttttcccccacttcctccacaaagaggttgtgggaagggggctgtgactccgtaggtgtgagtgggagtcgggggaagctgagcttgcagtggggatctagctcctgggggtctgtagggaacggggggggggggggacacgtacattacaggcgaccgtccagccacactcccagaaactccctggagatggacttgggggtgccaggcagaaagccacatctgggactctggagagaatcacacagagacgcgaaatcggagactctgggtcgaggcccccagccccacctgggcagagtctgtcctcggacccccgcccgctgtcccccgggtacggcctgccccagcgggcgcgggcgggcgcagtggccagggacgccgaagccccaagtctggccgacttcggcctgcttggtgctcgagtggggccggggcgggcggagagcgaggctgcgggaggcagcggtggcaggagcgggtgggcgggggcgctgacgtcagacccgggcccgggcgccggcggccgctcccctgccacatcctggtggccgcgctcgcagccgggccgggccgtgcgccgcgcagcctggcagcctcgcgcgcagccaccggggagcgggcgggagtcatgcagcggccttgagcactaggggccggcgctgaggagcgcgcgcggcgggagggcagccgagcatggagctgagcctggagagcctggggggcctgcacagcgtggcccacgcgcaggcgggcgagctgctgagcccgggccacgcgcgctcggcggcggcgcagcaccgcggcctggtggcgcccgggcgcccgggcctggtggccggcatggcgagcctgctggacggcggcggcggcggcggcggtgggggcgccgggggcgcgggcggcgcgggcagcgcgggcggcggcgcggacttccgcggggaactggcgggcccgctgcacccggcaatgggcatggcctgcgaggcgccgggcctgggcggcacctacacgacgctcacgcccctgcagcacctgccgccgctcgcggccgtggccgacaagttccaccagcacgcggcggccgcggccgtggccggggcgcacggcggccatccccacgcgcacccgcacccggcggccgcgccgcccccgccacccccgccgcagcgtctggcggccagcgtgagcggcagcttcaccctcatgcgcgacgagcgggcggcgctcgcctccgtgggccacctctacggaccctacggcaaggagctgcccgccatggggtcgccgctgtcgccgctgcccaacgcgctgccgcccgcgctgcacggcgccccgcagcccccgccgccgccaccacccccgccgctggccgcctacggcccgccaggccacctggctggggacaagctgctgccgcccgccgccttcgagccgcacgccgcgctgctgggacgcgcggaggacgcactggcccgcgggctgcccggaggcggcggcggcacaggcagcggcggagcgggcagcgggagcgccgcggggctgctggcgccgctgggcgggctggcggcggccggggcgcacgggccgcacgggggaggcggcggccccggcgggagcggcggcggccccagcgcgggcgcagcggccgaggagatcaacaccaaggaggtggcgcagcgcatcacggcggagctgaagcgctacagcatcccgcaggcaatcttcgcgcagcggatcctgtgtcgctctcagggcacgctctccgacctgctgcgcaaccccaagccgtggagcaagctcaaatccggccgcgagaccttccgcaggatgtggaagtggctgcaggagccagagttccagcgcatgtcggcgctgcgcttggcaggtaggagcgtggcgcgcagggccagaccctgggggcgccggctctggactcccgagcacctagcggggcggcggccgatgcccggggccagcgccccaagccccgcccgtgcgccccggcagcccgggaccccctatcaggaagctagaccgcgatccgcgccgctgcccgtttgtaccgttgccaaaagggagaaagggattgtgccgcctccccgccccccggtcgccgcttctgcccctttcgggagcgcgtaggggttctctagtccttgttagactgctgggaggctccgagcctctccccaagcagccctcagggaagctcattgtgtgtgtgcgtgtgtgtgtgtgagcgcgcgcctgttggggggagctgtgtccccgaacgagctgctgttgtcggctaaggtgccactcccctcctccagagtgggtggagaggggctgttgagcccccagccccgggccacagagctccgagacgttgcggcgggcgcctgcagctcagcagcagaggccgagcccgcgctcatccccccacctgccccagcgcgcgcttctttgtagttcggccccgcgatcgataccccctccctctcccctccggccgctggcaaaggtcacccgagaatggcgggggaggggcggccccggggaccctcggcccgcgccgcccggaggccttcacaccccgacccggcgcccgccccgcgcagtttggtcgtggctcgggtgcgcgcgcccctgcccgcctggctttggggttttgtgtctctcatgtccacttctctcctctctcggtcggaacacactggtatctctatgtttttctcttgctctccgttttgctcttgttcctgctcattatctcttctccctgtcggtctctccgcctctgtctctgtctcatactcagccaccggccccctggggaccctcctccctcctccctcccagctgacaacagctaagtccacacctgccctctgacaggcagcccggccaggcccccatttcctaggtgggggtgtaagggtgcaggagggcccctggcctaggtgggggtttctttccctggtggtgctggggagggggctgtccacccgggccacagggacaatagccgcggcggctggcgcctgatcgatcgcttctccgagcacaagggcgagaaaggcgggggctctgggaggcgccccactagcaaagaggcagaggggcttgcggctgtgcccccaggcagcccgtccaggcaggggggctgggcgaagagaggacagcggggtgtcctgtgctgttcctccctagaaagccattccctccctccaccccaggaggaccagacaaccccctgggagcctggacccacaggccggcctcagtttcccccttctgcagagcaagcaaggtgactagctggaacctcttatgggattcttagatttttctgctttggggcacgggaaaataaatagtctttcgcgtgtggcagggtaaccttgtgctcagggaggtccgggaacctggacgatttcagtctgtcctgctcccctccccatgacacatacagcggcactcgtgcgctcaccatagaccggcggtcatatccgcacacagccacggccctcgaggtgcagtgcgaggcctcaggtggcagagggcacacccctggcagctctatttatttattgagacggagtttcactcttgtcgcccaggctgtagtgtagtggtgcgatctcggctcactgcagcctctgcctcccaggttcaagcgattcttccgccttagcctcctgaatagctgggattacagacgcccgccaccacgcctggctattttttttttttttttttttttttgtatttttagtagagatggagtttcaccatgttggccaggctggtctcaaactcctgacctcaggtgatccgcccgcttctgcctcccaaagtgctgggattacacaggcttgagccaccccgccgggcctccctctgacgtttaaacaccaactggttgccatcacaccagtaaggcagggacagtttctatagcccgatacccaccacctcctgcctcctctctagcacatatttgggggacattgtgtccaccgtgggtgcacccagagtccacaccactctccatttttcccactgtcacgttatgtaactaatgacccattagcagtactggaattgcagatttgggggccacagaaaacatcagccagagcgtcacagaagggcaaaccgcaggcgagaagtcccatggggggggggtgggctccccgcagccgggtcagcagcacccagcacccgccctgagtggacaccgcctgcttcgcctgcacctgaccctgcacccaggtgggtgttcgctcctgccgaccccacagccatccaggcctccgccgtcccctttctgccacggggagagttgcagatggggaaacaggctccgtttgtgcctcgccttcctgacttgtgacaatgacaaacagtctcagctctgggagtctgggtttcctgtcgaggaagggagagttagaacagtcgccgtctcaggggtgcgtgggggaaccggaggggtgagcgcagctcctggcaccccgagcctcccgcagggcgctggggcgttgaggatgataaacccggaccacgctgcccgcctgctctctgccgggtccgctgcccacgccgtggccccgccgcgcggccccgcggccgcggggttcacgccgtcaaccttgcgcacctgtcgcgtctcaggtgccctgggggccgcgtctacaccaccggactccgcctggggcgtaagaggtggcgggggcgagggccgcggggtcactaggctccggcccaggcctttagttccggtcgctgcgcaaatgaaaagcggttaagtggcggcaaatcgcggcggttagggggagacggccggatgcgtccccatctccacctaacacggcgacgccccaacgctggtgctcggaaagggaactctgcccccgccccgcccccgcaccatttcaaccccgcagcagaggactcgccgccctttctactccggcatccccattccccgctccgcgagcaccgcgggcctccccaggcctcctccaaggagaactttgcgccccgggtctcccgtcgcgcttgcccggctcggggcgggccacgcgtttccgcaggtgccgagtgtcctgccgggcgccggggccaggacagagacggggacagggagggagaaagacccgcaggtgcagacggagagggagggggagacggggagatggagagagagggaggggtcgcgagacaaaaccagagagtggggagggagagaccgggagcgggagaaacagacggggagaagagaaaaagaagcccagaaaggaacagaggtgaaggagagacgaaaagagaggcagagagaccaaaaaaaaaaaaaaaagagagagagagagagagagacagagatgggagaggaactctgggtgctggaggctgcctctgtgtccacccccgccctcccacagccccctccttcttccccatggggtaggacttgggagaggggaataggtgttttccttgtttcaccaaagcacgcaagaaatcccaccgcagacctcggagtcccggccccactgcccgttctgcgtgcctcagtttacccatctgtaaaatgtgcgtgtggtgggccgaattctgggtctgacactgtcagattctggaccccgtcgtctgggagtcctgcagcccccaagcccattcccatggggctgggagcctcaccctacccccaccccatggtcctccgagtcccgcacttcggagctgcctcctggtcaaagctctcccctggcgccgtctccaacagtaattatgggagaggggctgggggaggggcgggcgggctcctcggcgggggtgggggcggtcgatgaattcgaattaccgtctctaattcatcaccgtcgccgggtcgatagcttcggccgtcttcaaatattgtttaaattgcaactccggaggaaaagtattttttgtaactgatcagaaaaaaaatacgtatatagataatacaaagttagatggaggtggttgaaagaagggcctcatctcctcctgtgggcaccatggggaggcaggagcccagaatccctgagggatggtggagcccagcatggaggaaactgaggcagggaggaccccccacccccaccccaggtggatgggatgctttgcccttaagcagaacgaagtgtcctagggacaaaaaccagagctgtgtatggagttgcatgctgagggcagctggtgcaggaattgggcacctctgtttggtggtgggtgagcaggggggatgccagggactggggacctgaggggaaggacatggaaaggaaaaagaggcagaacctcttccccacccaggctcatacaggccctccctccccggcttctcccccctacccgctgccaccatcaagggctgaggttgaaatgggcgaggcaatctgggagtcccccttaaagggacaggtgtccaccccccacaagcactctggaacccccacccaaactctggatgaaggggagggatgagcagggagaggaggaggaggaggagagggaagggagggaaggaaggggagagaggagagagggaaagacccctgtgccttttgcaaaaaccccactttccactgcaaggggtccacgcctcttacggacacccccagaaaaatatgccccacgccactagacagtagagataaccaaggttgggggcttggagacccgggccttccctgggctctgtccctggctgatccctggcaaaaggacttgagcctcagttttcttatctgagaaatgggcagaatgaaatgacgcctaggagagggggtatgaggggctggaggggctcaggggtctgaaggggccaccgtaggtttccacagggatgcacggagtgtggatagaccgagaccgtgcccagggccacgagaaccagacccacgtggggctgcgcgcgagactcaggtgactctggtgcccccacaccagcaccctcccacaaaacttcagggcccggggaggagcagccctagctagggacctgggccaggatcagggatcaggctcccgcctcccgtgcagagggggagggagatggggaggggtcccactggatgcccacagcccttcccctcctcctcagctcacctgcccggaacgacattttgaacccgatgcggttcccatgcccaccctacagaccagcaagctgaggccgaagagaaaggcgcttgccagagccccgcactgcttctgatgcggagtcagcttccgctaggaggggccgtaacaggaccagggcgtggctttcggctgctctgaccccgctgagtctggtgggcctaacactaggctggagatgcccaggctccctgacctccagcagagatgggggagcattccaggaaggtgacgcttcgggacgaagtcttggaggtgtattgaggtcaaggaccacagagaagggaccggcgggggggcggggggtggcactttccacgttctcagccacttggccgatcctcaggtggggccaggtgaccggccagttccacctccccaccccacaggagccacatcctttaggggtggtgaggcctgcgctgcgcttccccctgtgccccagctcctccaagtatgatgatgttgtgggcatgtgagtcctctcacctgggagaccaccggagactcccagagaggatgggcggtgggggggggccaggtcccagcctcatcgagtccagctcagagcccccaggaccatccccgcttttgcttttcccagcagacctccccctcccaacgccagcctcggtcccaataattcctttctgtagcctgggagacagggacgctcgcccccaacacagaggagtctgggggagtctcttgagtggtgaggggctggagctggcctttggctctgaagtcctcttagcctgaagtcctagaagtaatcatgaccattcattcttctctctgaatctccctcccattccgtgctgcttctccaacaaccattaccactctagtctaaaccactatggtggtctcctcctccacctccatcatggcttcccagctccattcctgctctttttttttttttttttttttttggagatggagttttgctcttgtcgtccaggctggagtgcagtggcgcaacctcggctcactgcaacctctgcctcccaggttcaagtgattctcctgcctcagcctaccaagtagctgagattacaggcatgagccaccacgcccagctaatttttgtgtttttagtagagaccgggtttcaccacgttgaccaggctggtctcaaattcctgacctcagatgatccacccacctcggccacccaaagtgctgggatgacaggcatgaaccaccgtgcccagccttctcctccttctcactgccgtctcccccacatcctaagggagctttgcatggccactttgggttggcaccccgggttggcaccctgccccgtggctccccagagccctaaaatataaatgtggtttcctgtggtggcctacagtgcctgaccctggcctcctgcgtggatgtgggaggggacttctggccggtgggaccagcagggacaaaggctgggaggtgggaaagtcctgagcagctgttaggagggaggctgagccgggcaggtagcccggcttacccgggagagctggcgctgggtggaatcaagttcttaattaaatatgggccctgatcaatagggagggaagcactggtggggtaggggagaggctgaacaaggagccagggagacccacctgaccttgggcagccttgggacacctacggcctcagttttccctctgccaagtaggtgctaatgtgagaggggctgagaaaccggcacccctcctgagtcccgagtgtgggcagatgtggggggcgatgggggacccctccgagctaccaagtcatgacctcagagccacagattcacagaagagagaaacaaagactggaagatgtgcctggcacaggctgctggagaggcgtgcccgggtcacaagtgtagacgcacccggagacacgtgtgtagacgcctccgttcacactgggacgagtgcagactgacccaggacccccatccgccctctggcagtcttgagccagcaactcccctaagtggggtgcggggacatctggaagacgccccatctccccctggacgcagtggctgcgccatctggagaccctcgtgctggctgctgggggtcctgcgtgccttccgcgcgcccccagctgcgcccgccagccctccaaccctcctgccctcctgccctcctgccctcctctctgggagtcgggacagaagctgctgggctctcctccctggagctggggctttgggaaggtcgagtagaccctcagtgagtgggatgcgcgagttggggacgctagttgcggggcagcaggggtccacgcatttccaagcgccctttcccgtccaaggacctgctggggggatgactgtgcctcagtttccatcacccagcaaacgccgtcccgcagcacccgggaagctgcggagtcgggctggggccgccgcgttgcgcacatcggtccttggcgggtgtgtggatcccagagcgcgcccggcccccaacagcctgacaggacctggacgcacgtgccccggcgccaggagacccgggacccgggaccacgcgcccgcggccttggagcctcagggtcactggtgcgggctccgcaggaaagcgcagcccccagcaggcacccaccatcccacccccgcatcccaccccaggggaaaccgcgccgcaccaggcgcgagtgttcttcttccttgtctggcgccccagaaccgcggccgtcctgggtgcgctcagctccagcgcagtgggaggacaagacacgttcctcctcccctcctccacctcccttgtttttgctccctggttccctaaaatattctacattcttttggcccggcggggaggctcaaacctgtagtcccagcactttgggaggccaaggcaagaggatctcttgaggccaggagttccagaccagcctgggcaatagggagaccgcatctctataaaaatgtttttaaattagccagatgtggccgggtgcggtggctcacgcctgtaatctcagcactttgggaggccgaggtgggtagatcatctgaggccaggagttcgagaccagcctggccaacacggcgaaaccccatgtctactaaaaatacaaaaattagccgggcgtggtggcacatgcctgcaatcccagctactccggaggctgcgacaggagaatcgcttgaacccaggaggcagaggttgcagtgagccgagattgcaccattgcactccggcagcctgggtgacagagtgagactccatctcaaaaaaaaaaaaaaaaaaaaaaaaaaaaaattagccagatgtggtggtgtacatctgtggccccggctactcaggaggctgagccaggaggatctcttgagcaagggaggtcgaggctgcagtgagacatgactgcgtcacttcattccagcctgggcaacacaggctgaccctgtctcaaaaaatgataaacaaataaataaatcgacatgattttacaatagttaacgcattcgccagtttccgaatttcaatgcaagatgaggtggcttccattgccctcccttctgcaaatcacagtctgtatttctccttcttgcaaaaggctgcgctccagggataaattctttttatttcccttttttgttttttttttttttttaacagaaaggggagcttcagatgctccgagattcttccccccggctcagatccgtgaagcgcgcatcctggtcatttttgccggccgcctagtactctctgactcggcggtggtttcaggttttcctgaaccacttccccgccccgctgacatttaggctgtttccaatcgttcgcggtcaccatagcggctgcaatgaatacgtccggggcggatcattttacgagtgtgagtttatctgtggattaatttcccaataattgaaacgctgggtcagcctccccagcccctttctgggtggccgcttcagccgcttcttatcactgattcctttcctgtcatctttttcaaatccatttcccactgcaggcgctgtgtctccgtaacattttttttaaaaatcaacgccttgtgcgtgcgtgtgtttgcccactggctttgctcctgtttgagggtgcctgaatggggtgggtctctgtagctgaatgtccgagggtgagaggtgccccctgacacccccatgcccccaccccatggcggcccagcctccagatggagccacgagggagggacagcccgagagtccaagtggaaatgcgtttcccggttaagtctttgaaggctcagaactaatttgaaaatgcagtcattaaaatcccatcaggggaggctggcggggaaagctggagggagaggggtggggacaagagggaggctgggcgcctgctgaggccaaggtgggctccgcgtgagatgtgggcagggcaggcatggggagggtaagccacccagagtggaggggtagtgggaacagagtggggccagatgaggggctggggaggcctctgggggtccacgcctggggcatgactcagccccatctccttggagaaggttccactgcctcccacccatgggaatcaattttccagctccccgaggggtgcagggtgtagacagagggtgtaggtatgtgacccgggccccccacagtaactggacatgtgaccttgggcaagtcacccactgactcgagtctggagaggccacgggggggggatgcgcaggggggacaagacaccagcatgggggtggggggcatcagtacaacccacatctggggcagggcagctggtggcggggacaggacgcgtcgccaaggaaaccggtcatcatcccagccggagaccgggctccatattgaattgtctgctccctgaagccagaggtggctgagggaggggatctccagctccaggacacagggaggacgggcacacagcggggtagactcacgtggcttggtggtttggggcactgtacagactgtcgggcacagagggacatgggatggtcacttgaatcgcccattgctgcatcctggggcgtcttcttctcccttgggcattgcccagctggtctccatctcctctagttgctctttgatctcctccctggaccttggggaccccccaggagcctccacatccctcccgtcctggtgccaccctggcttgtgtctctcctgccgtgccgcccccagcactgctggcgtccactgggattcagggaccttccctccagctgtcccgaagcctgggcctggtcttctggtccatcctccctcccagccagcagtgtatccactcgaaggcctcagagagcccagtggagcccgcgcctcccctccagtacccacccaaaggcgtcctctctccccctttcctggactcagagcggagctggcctcctcattggggaacagagtcccaggcagccgccgcttcacgctgtcctgtgactgtgagtggaggccagctcctggagctgcctctctctggcctcacgcagcagctgctccctgaatggtgaatggatgagtcggttgcaggtccgtgcttcggcgttcattccttcgtgactctcgggactgcggcccggtggggacacagggctctgggtcactgcgtccacttgataaaccaggaacctgatgtccagagaggccagggtgcgcgttcaaggccactcggcccgcagagcccacccgcgtccccatggctgcagtggtgaggggagcagggggaggcagagaggagcccaccctggggctgggcggacatggatgcgtaacccacaccgcaggcttctgcggggtgacacccagactcaccccaagaccctgcacaccctacagctctcacgtctcacgtccacaccgcgagccagctgcatcccacacagggatgtcacaccaagatccgttgcctcatccaccgcccgtccaaggccccacaagctgatgccggttttcccgcccagaactggaacagctttcctaacggtcacaggtttcttagcttctcacttgggtggggtttggatgtgcaaggctgccgacccccatcgtggttgagcgcccgtgcaggcgccacccacccacccacagcacctcgctcagacttcgccctccaccccgccgggacatttgggaagcctcaggcagccccacgcgggcacacccgatggtggacggaggctggcaccctcagcccgcacgcggccaacgtcaggcgcgcgcagaggcacccacgggcccgccttcaggggcgaggcggatgctgcatcctgaagccctccctgttacaagcccagcccctccaaaggcctctggatgaaggggaggatgaagggggagagaaggaggaggagggggagagggaaggaagggaagtgagggaaggaaggggaagaggggagggaggtaaagagagggagggaaggaaagggaggaaaagaaaagagcagagaggggagagggagggagggtgagtggaaaaggaggggtgaggaggaggagaggggatggtcccctcttggagggtgatgggggttgacaggtgggccccagcttgggttgcagcaatgactgaattcagggcccctactcagctactggcttcctgctgagggcactcggggagccccactgtcccacccggcgctccagggcagtggctactggtcttccgcagcagggtcttgcaggctgggctgagaccccccccccatgctccaccaccctcgtgtaggacaacccaggaacatgttagtcactgcacactcactcagccactgctatacctccgctctgtgctgggccacagaaagatctcaggccccacgaggctaaaaggaggaacagtggcccctgggagtcccagaggaggggccccgggctccgctgcggggggagggagggacttcctggggagaggccattgctcctgggcgttgaggaatgtgtaggagttctctggctggagtgacccaactttctactcttggccccagtttctccatttctcccctctccaggaagatcctgagagaaaacctgaggctcaaggccttccttgagggagggggaaacttcgtggttggaaggcaagtgtcgcccagagcccagctcctctcagggacccccagatgggagctgggagcctcttgttagccctgccgtattcattcaggacttttctggctagacccttccccacagcccaaccatgatcaagaccatcttacagttggggaaactgaggctaagatggtccaacaccaggcagggcccaagagggcagcaggtcagaccaccctcttgggccccggggtggttggctgtccccagcaacttttagaaaggcaggaagtgggatagagctggtgtgtgtgggccaaatcccaaggggtctgcaggaaacgccttcatccggaacttgagggtctccccccagtccagccccctttcccccgcatgagacacagcctacagcccccgccctttcctgggttggggcggggacggctgccctctgctggacacagcgggaacagcagggataactgagcgaaggggcggccacatccccgggacctccccgcccagagatttcctgatcccacctgcccagaaaagaaaacgacccttgttgatgctgggggcggcggcgcaggcccaggacggtgccctggggcgggaggctggatgctacagtaaagccaccatgactgcgtttgccgggctccctgtgcatgggctcagatgtgggcatggggtctccgtctcttctagttgatctctgatctcctcccagggccccggggacccccaggaaccagccccagatcctcctcatccttagattccaaaaagactgataaccgttggggagatgggatgggtggtgtacctggagtcctcagatcagagcctctcgggggtgattgctcctggaatcagggcctcagtccccagggtcctggaggaggtgcagggctggctgcatggagtgggcatcctgtcaggacccaaaccctcactcaatggggcccctggacagagcaggtgaattgttgtaaaaagaaggggtgtggcaggggtgacagggagagttgtgggattagacaaggggtgttggggtagcctcgcagggaaggagatacctgagcagagactagaaggagctgaggggggcgggaggggacttggggaagagcaaccaggcagagagaaccgtcgtgcaaaggagctgagtgagtgaggccagcgggggaggccagacagagaggcggctggtggtggatggggagagggaagcggctggaagagctcaggagcccaggaaggactggcctgcaccgggacatgcctgaagggggcgcactgtctttacaaaggaagggactgaggcctccaagggaatgggactcgcctggggtcccagagcaagcttgacagcctggccccgccccactcctccgccagcttggtggccaaggtctgtgttgggggccactctctatccccccgactacaggtcgggagctgctggtgatggaaccaggggctgagtatgcagtgctggccacatactaggagaatcccaggatggggttcagcagtgttgatgaggataatgaaggaaatcagggggaggtgaagaaaacagaggaagggggtgagtaaaagaaaggtcatggaggaggtgtggggaggtggaaggtggaggtgatggaggtggtgatgggggtggaaggtggagacgatggaggaggtggcggaggtagaggtggaggtggtggaggtggaggtggtggaggtggaggtggtggaggtgaaggtggaggaggtagaggtagaggtgctggaggtggaggtaatggaggtggaagtggaggtggaggtgatggtggaggtggtggaggtggaagtggaggtggaggtgacggtggaggtggtggagttgctggaggtggaggtggtggaagtggaggtggaggtgatggaggaggagatgctggaggtggaggtgatggagatggaggtggaggtcgtggcggtggaggtggtgaaggaagaggtgctggaggtggaggtgatggaggtggaggtggtgaaggaagaggtgatgaaggaggaggtggaggtgctggaggtggtggaggaggaggaggtgctggagttggaggtgatatggagggtgtgatgggatagcactgacattggtggtgcaggagtgatggtggaggagaggacggaggtggagacctcattggaggctggtggaggtcgcgtggcagaggtggcaatggtgggccctggcagcatgaggctggtggttggtaccagggccaagtccagggcttcacccccgtccccactctgaaccccatcagtccttctctccaagtctcagttttcacttctgcacaaggggtccataaccaccatggcctctgggttggcacaggggtggcctttaggattggtgtgggggtgaacctgatgttgggtggggtgctggcgggggtcaggtggcggtggtgatgggtaggggatgcacagagggggcatccaggcggcccccctactccaactcacacctctgtcagcggctgtgggggatgggagcaatgacaaagctgctcgcggtaaacagctccgactggatcgatctgggctgtgaggagctgtaattagattgaacgccgggaaggggggcagcagagcctctttttgctgcaatcgacaaaacgggaagttttttcagactctgcctggcccggcccctcccccagcctctgcctctggggtccccattaggcaccagattggagcctgggaggtggggtgggaaagggacgatatgcatcctacctccctcccccatctaggccagtggactctgttttctgggctgccctattgggactggctgggcaagcctgaggggtggctcacattctctgagtaaataaggagaaaaccccctgccttgtagaattattgtaaggattgaggctgggtactgtgattcatgcctgtaaccccagcactttgggaagctgaagctagaggattgcttgaacccaggagttagagaccagcctggacaacatagtgagaccacatttctacaaacaaacaaaaaacatatatatatgtttgtgggggttttttgttttttgttttttaattagccagatgtggtgatgtgcacccgtggtcccacctacttgggaggctgaggtggaaggattgcttgagcccaggagttcaaggatgcagtgagtcatgattgcaccactgcactccagcctgggcgacacagcaagaccctgtctcaaaacaaaacaagaattattgttaagaattgagtgaccagatacatataaagctcttgacacaaagctcttgtgagctttctgaggagcatttgtatttctgtccctactgtaaatgtaggataaatttgtgagtaaattgctaagtgaatgaataaatgagtgagtgaatgaattaaacattacaacaggtgagcgagaagggcctcccttggaatttcaaggccccggttgagttttgactcagctttccctttgaaagaatggaggactgggtcctctcctgtaatcctcatagggtggccgagtgccaaagaggtgagaggtcaattcagttttttgcatttccttccatgtttctttatgcagataaaatataaacataggttcttgtctctcctttcacacataaaaggctccctggtacactgttcacccttcaggatttcctttgccatctttccagattcatacccatactctccctctctgtcagtctctcaatataattacaaatacagtctgttgcctaaattaacatttagtaattaacattattacgcttttggaaaacattgtccacagctgagccatgtagagtactaggactgcatttcctttcctgtacaactctttggttttccaggagttgatagctgccaaacaaaaattcttcccacgctccccaacaaaatttaaaaccaactcaataggactttccacacatattaggtcatctctgatctgggtggggctgccctccataccctgggtccttttgtctagctgtcttccagggtccccctcatcctgatttggaggaccccttttctctttcagctaggttggatcacattttctgaatcccacaccatcctttttttatttacctcctcgtttgaatggaacacatcctccagtagctttctgagaaagggtatgtgggaagttaagttttggagtccttgaacatccgattatatctttattgcaccttcatgtttggtcttttgttatttagcaattctagctgaaaataacttttccttggaactttgaaagccttgctctgttgtctgctagtttttgcacacccaaagctgcttggattcttgatcctttgcatgacatctggctttcctctaggcgctttttaggattttctctttattcttggtgctctgaaatttcacaacaacgaggcttgagtgtctttttcattcaatgagctgaggacttgatgtcccacccccatttttttagagctggggtctcgctctgtcatccaggctggagtgcagtatcatgatcataactcactgcagccttgaccttctgggctcaaatgatcctcctacctcagcatcctgaataactgggaccacaggtgtgagtcaccatgcctggctaattttaaattttttgtagcaatggggtctcactatattctccaagctgctctcaacctcttgggctcaagtgatcctcccacctcagcctcccaaagtgctgggattagaggcatgagccacttcatccagcctatttagttattatttatttatttatttatttatttatttatttatttatttttgagacggagtctcgctctgttgcccaggctggagtgagtggtgtgatctcagctcacacctctgcttactgggttcaagcgactctcctgcctcagcctccccagtagctgggattccaagcacctgccaccacactcagctaattttttttgtattttttgtggagacagagtttcatcatgttgaccaggctggtctcgaactcctgacctcaagcgatccacctaccttggcctcccaaagtgctgggattacaagaatgagccaccatgcccagtgggcctatttatatttaaaaattatttattttaaaagagagtcttactctgtcacccaggctggagtgcagtggtgagatcatgctcactgtagccttgaacccccagcctcaagtgttcctcctgcctcagcctcccaaaatgctgagattacaggcatgagccactgcacctgaccacatttaaactggaaactcatctttcaacgctagattttttttcattatttgatcatctcttcctctatttttgaactgtctcttgatcaggtgacaaccctgcttcatcttaattcatcctctaactttttattctctttcatttcccatctttgcagctgcttgtgttccattttctgggatatctgctttactcttttttttttttttttttttttttgagatggagtttcactcttgttgcccaggctgaaatgcaatggcacgatcttggctcaccacaacttctgcctcccagattcaagcaattctcctgcctcagcctcccgagtagctgggattacaggcatgcaccaccacgtccagctaattttttttttttttttttttttttagtagagacagg[148 bp omitted]ttttactctggctgttatatattcacattttaagagcatttcctcactctctaatggtcccttttacttaacagcatcctgtacttgtttcatggatacgatatttttctcttactcctctgggaatattaattatagctttgcctgccttgtcggttccttctgagtttattcctcccccaccaaaccatttttctccattgttctcccccctcctgcctccctccctctctctctctccctctctttttcatgttagacgcttttctaaaatgtgcagtaacccacaggcatcacttgcatttaatcataaaacctgaaaccgcagttagaagccccacacattccaggtcagagggagtgaagtgtgcgtcagctcacaccctagacgggtgaacctgttgtccccgagacatgagtcatggcagaaggaacattcatttatttctgtggacgtgtatggacattgatctagcatgtcatgttccaggctgttctgcaacgaaaagaaaagctctctgtgccattccagtaggccacgacggctggcacagagaagagactgggagcagagacccactagtactacctgcaccaccggccacttctgggggtcacagagtagctggaactccgggatggagacaagggcaggacagcctcttcagcaccacagtcccagtctggatgcaggagagaaattgagattctgatggagtttcaagctgatgccacaaatgagcccatctgacttgtggcccagctcctagtgggggaagcctgtgttttgtacccactgacacccactgcattgaggggaggggttcacttcgctgctggagcaggaagagcaggactcggcttcagccctgccccatcaccccgagcctttgcttttctcccctttgcaagtgtctggtctgcaggccatggggcagcctccttcagccctctccgtgatctgtgcgggctgaccaagaggaagggtgacctgctcatctgggagaggaagaggtggtccctgcactctcccctcctcctccaaagtcttctttcttagatgttctgcgctccagagggtccactgggtgctcgagggaggccaagtctgggtggtctcagcctgtggataggggcaggagcaggaggcagggattcagatgtcggaattgggctgtggactcacagggtccctaagggtatcaggccttacaggagtgtcgctgctgctcattcgtagagcttggttgtcacagccagttgccatggcacacacctgtaatcccagtgctttgggaggctgaggccagaggatcacttgaggccaggcgttcgagaccagcctgggcaacatagcaagacttcccctccgcaaaaaaaaaaaagaaaagaaagaaaggaaaggccctggttagcccaccatttctggggaaggctgctgggttttgtgatgcaccccaggacctagtaattaaccagttatttcacccaagtctacactgagccaaaaactctcatgtgcagtttccatgtcatttccccaacacccccaggttggggctgcagaaaggagaggagaaagttaccaatatcaatttctgtggtcctttaggtagggagcgtttgagggtaggacggggtttggggggtatgaggcttggggggtgcctgagtgggctccatggagaagggggctggagggggtggtagccatgcctgcagaggggcactcacactgtgtccccttctttgtcctccccccacccccaccgcatctgctttccctgcctgtcctcgccttccattctgtctccaccgccctctggctgcatcctggactttcctgttgtctccctgttgaccttgctgtttccctgtctctgtctctgtgcgtccctgtgttccccgctgtctccccctccgcctctccctgcattcttgttgcttctgggctctccctgggaccttatgtgcattcgcctttccccaacgtgtcccttctcccctcctcctcatcctccgggcggcgtgcgcctcctgcctctccccggccggccacacggtggcgctgtgtcccgctcgcccgcccgcccgccgctcgcccgcagcctgcaagcgcaaggaacaggagcagcagaaggagcgcgccctgcagcccaagaagcagcgcctggtgttcaccgacctgcagcgacgcacgctgatcgccatcttcaaggagaacaagcggccgtccaaggagatgcaggtcaccatctcgcagcagctcggcttggagctcaacaccgtcagcaacttcttcatgaacgcgcggcgccgctgcatgaaccgctgggctgaggagcccagcacggcccccgggggccccgccggcgccacggccactttctccaaggcctgaggcgccccggccccgcgccctccctgcctccacggcctgggcgctgtgcccccacgtcacctccccacatcctgccggcccggagacccgcccccagggggcacctggagggggtgctatccgggccccccacacccggggagggggaagcagcacaccccccagcccaagtgcacaaaaagggccccccttcctccctccatgcccactccctccaggccaaaggaagccctccacccccccccggaggggagggagtgacagaaaggggtttcccagccccctctccattcaggacgcccagagggcctcgagaaaaaccagggctcactgtgttgtcccctaaagcgggtcaagaagcacatactagaaatataaaccgggtatttaaaaatggaattttaaagaataacccctcctccgtcagatcccctgccccaccgagggaggtagtagaaaacttccttcctccccacccgccccggccccctccccagggacctcagccctttccaaagtcgccaaaaacccacatcaagccggatccttacggtcccccaccctctccaaaaccaaccccacccgctggcaggacggcccctgcggccgagaactgagctgcccctctctgcggccaggattcctcgtgccaagaatcgcctgccttaaagtctggggaggggcctgcggcgggcgcccagcacctacgggcgagcacccttcccaccccatcccaggccgcaggggacggggggctcccacgtgcgggtaaattccagacgcccccgccccgccccgtctgttgagttcactttacctttaggcaccttcgtggagcgcaaggaaggacgcagctccggacacgggagaccacgcccaggctcccaggagaaggggacccggccggagaaggcgccgctggggccgcccggaggagcccctctgcacgggcccgtggagacgcttcctgcgtggaaccttctggaatccaccgcccccctttccgcccgcgtcagggtctgaactgggcttgcaggggggcagcggggttgaacgtggtgttggtttccactctcgccaaagagagaagacgccgaggaaggtggattccgcttgctccattttttgccaaaaatatttacaaatgggaagggtcggaaatgaagatgagcgcccccctcccaccccgcgctctcccccgctcctctcatctggtctgggtgacctccgagactggccggccgcgggatcccaggagcccgcctcctccgggggttcaagatccgagtctagaaggaacctcctccctgaaatccccccactcatcggctgcctcccagggaggaggcggcccccctaccccccttgaaaatgcaaaagacatttctagtgaaatgcccctcccctcccccaggtaaaggctacctcactcaagctcatgtctgtgattggaaaatcacgcctgataccaaagatttctcccaaggatttgtgctggatgacaggattccctggcctgggacccggctcggggccccgcctgccgagtgccaccccttcccgaacctgagagcgaaagagagagagagagagagggagagagagggagagaaagggagagagggagggagaggatcgtgaggtcgaagagtgccttcttcttgaaccaaagacgtgtatggagtgttctcttgtccttatcgacttgctctgctcccagctttccaagcgaccggatctgagtgatgcttctagaacatttgggtgttggggggttcccaatagtagaaagggtccccattcctgctcagcaccgcacctctctacccccccacagacacacatgcagacacacacatgcagacaacacgcagacacacacatgcaggcactcacatgcaggcccatgcacacacacgtgcacacacatgcagagacatgcagacacgcaggcacacatgcacacatgcaaagacacgcatgcaggcacacgcagacgcacacagagacacacatgcagatacacatgcacacacacatacacacactggcccctgtttttctgtggtgtcactgggtgccagcaactcggtatctcccacctcccactaaaacctgggccttaatttctctcccgtccccacccctaaattcctgatggatgaacctagagctgtcctgtccactccaggccggactgacgtagcctatgggcccagcaggtccagggcccacgttttaatttctttttaaaaagctttaggtcttgccgggcgcggtggttcacgcctggaatcccagcattttgggaggccgaggcgggtggatcacaaggtcagcagttcaagaccagcctgaccaacatggtgaaaccctgtctctactaaaaatacaaaaaaattagctgggcgaggtggcaggcacctgtaatcccagccacctgggaggctgaggcaggagaatctcttgaaactggaaggcagaggttgcagtgagccgagattgcgccactacactctagcctgggcaacgagagcaaaactccctctcaaaaaaaaaaaaaaaaaaaaaaactttaggtccaagaagatgcaccccattcaacataccatattatttgtctttataccaaggtagcctatagatatacaatgttttaaatttcttttttagaaacagggttttgctctgttacccaggctggagtgcagtggtgcaatcgtagctcactgcagcctcgaccacctgggctcaagtgatcctcctgcctcagcctcccagtagctggggccacaagcacaccccaccatgcccatttaattttttaagggatttcttgtagatatggggtctcactatgctgcccaggctggtcttgaactcctggccccaagggggtcctcctgcctcggcctccaaaagtgctaggattacaggtagatagacatttagtggaggaagaggctctcaaaggcaataaaatgcttctgatccaagagaatcacgctgcagccctggcccagtgagcttcttagaaaatcgatgcctgggcttcaggcactggccggagcacgggcctggcggggtgctgggtctcctagatgccctctgcttggccttcaaggccccaagggtaacacgctagggggcctccagttttgtcccctgctggaaatttaggacttggcttgggatcgttctggttgtggaatgttttagctatgctgaactgtggtcagatcaggtcaagcctcttggtcacagaagtggcccagcagcactttgggaggccgagacaggaggatcgcttgaggccaggagtttgagaccagcctgggcaacacagcaagaccccacttctacaaaaaaaaataaataaagtggcccaggactcctggatccttttcagatatcttcgtatcacacacacacacacacacacacacacacacacacacacacacacacccctacctgtttccggaccccaccccaaacttggccagacccccacagaaggctctatccccgacctgcccgccggcccctcaggccctctcctgcctccccgcatgcccacttggctgtcacataccaaagagcatgcgttctccatgcagggatcaacacctccagcacaattccttcgagcctttgacaattttctctgaaatacctcaaaatatttaatgtatagtttatgtgattaaaaaaaaatccttagctagtttttggaatacgtgacttgaagctttataccgttaaattataattttgcagacgatggcatgtcgtttctttgacgagttccgtgggagacgcattgaatgtcagggctggagaccagagggaaagttagagggagcgtgatcgcgagagagactgcggcagaaaggaccagtggcgtttacagatttcttatttaaatgagtcctttaggaaagaaaggaagagagagagagagcgagcgcaagagagagagagagggagagagagggagagggagagagagaggcagaggtatacctttctgttctctggcttgttctgtttcttgttttctggagtcatgtcttataagagtatttattattctctgtgttctgtgttcaaatgtaatttaagaaaaaaaaaggaagaaaaatgcaaaaaaaaaagacaaaatggaatttgagttggtgcatgactaatgtactctttcttgacgctaattgtaataaagtggtcagggtggggggcggggggcgtggcccggttccgtgtcgcatctgtgtgtctggtgcctgatcggtgctgttcagtggtttttcgttactgtttctttcctcctttctaaggaactgtgtccagccgggacaggtggacggggccccaggtagagggggcgggaacagagcctcagtagccgggtctcctccacctgcctgtccatctccacccgagatgccacctgcctgccccagccaggcgggagccaccgagcgtccccccctcagttcctggttcttgggggcactctggtgtcatcgatatcttagacccccccaaccccccatcacccggttgctttcactctagcatgaattcccaagtgtcttgttcagaggagacagacaatcagcctattcttgtcttgttgcccagggtggtgggggacgggagtgtgccccaacttcctgagatctgaaggaccctcctgagggccccaacagcaggcaccagcaccccctccccccccacctccacccagacagcctcggcctccctccctgggctgggcatgagtccgcctttctgtccagcccgggaggcagggggtgtacgcctgcagagacccctccctcccagcccactttcggagcctacagaacagaggactccccaaaatcatcaaagggggctctgggacaatgtcctctgcctctgactcctcttgtgccatgaggccacgtccctgagccatccccagatagtccctggaggtggaaaggggcacagatgtgccagcttgggaacagaggctggaggagagggcggcaggggagagatgagaggggccgcttttgggacaggccccagtaggggggggcggggtagctaaacggggtgcttctcaccccataaagcagcaagccctggtctggagggctgggcctggggctgagggctcagctgacctcaaatctgaaatgatgccggggccaggatgctccttgcaccagcaggagcttgggccatttcacattctctgccccaagcggtttaagcaaaatcaggccagtagactcctggggctcctcctcgtggccctgtcagaccacgcaggggctggttttggtggaatgagctcagccgggggtgacggaagagccaggaggccctgcggccttgagtgttttgaatagactggaactgagggctgctttcaggggagacaccacttggaccctccaaagtcccctcccctccagggacaggggagagaagcccttttccaccttcacccttgggcgacaggcttaaaagctaaaaaaaaaaaaaaatctcgtcattgttaaccattgctgtgctgggtttgttgatttgtttttcttcaataaattattttctagtcactcacctgggcgtgtgtgttagctgacgggtcgggcacagatagggggcgggaatggaactcgcccacctcgaggctggggagggaggaccggagtgcagggaagacggactttgcttccacccagctcgcccctctctgctctgagtcccgtcttcttcctgggccagtggccagctctgagcctccacaatccacacaactccaccacccacacaagtccaccacccacagggaatggtaagaatcagaaagaggccaggcgcggtggctcacacctgtaatcccagcactttgggaggccaaggcaggcggatcacgaggtcaggagatcaagaccatcctggctaacacggtgaaaccccgtctctactaaaaaatacaaaaaattagccaggcatggtggtgggcgcctgtattcccagctactcaggaggc[136 bp omitted]ttggcgccttagaaggaaaagcttggcgcctttgagtcaaccaagccccaagatgcacaccttgtcaggacctgcttctgtgacatcactgctcattgctttctggagtctaaagtgaacggaggccccagtgaatgaaggtgtatttgaatgggagaaaccagggcttcccgatagaggaagaagctagatggtacaagaactggaatttataaactttcttgggaggggccagctgtcaggcagcgggggagccacagcttttaataagcaacttttgagagcaatgaagctttacccacattatcttaccccagcatgaagaaggaaagttttccctgcaaatacccggctggaccactagaggtcagtgttttgattttaaaaaccgggaaggaatattccatcacaaaaaaagtgtagggaaagagggagcctgaattagcgctggggtcagatggaccctggtttattagaaaaagaaaagcatgtggagtccttgtctttagaggaaggccccctgcatgctggttgacttgcagcagaactggctggagcttcttcttcccaggaaggacatcttcctgatatgccagcgtgactcctttgggctcgaagatgcctcttcatcagatgggtctagggattcagatgctacgtcactgctgaaccctggtcccctccgcagagggcaatgactgctcctctgggggcaaggatagctgctcctccccgggcaccagcagccactccatggatgatgatgactgcttctccgcgggccacagctccacctccataggctgctcgctcgtggacgtggacgattcttccagacttggtggcagagtctccacctgagatttgtgggtcttgtctggaagtggcaccgtcccctccttgggggtgtgaggctccttttgccagctcttccggaacggtgtggagggcttcaaaaatgctgacttctcctccgaggagtctggctggctctccaacgtcagctggcctgaaagaaatgactggctccccagaggctgtggctggctctcaaatgacgacagctggctttctctgtgcaacagtgatttctcctgaaaagaatgtgacctctccttggtcaacagcaacttctcaggagaaggtggcctctgcttgggtgacaatgacctctcctgtgcccttggcaattgctcttggaaagactcagatagcctgttgctgctggtgagcacatatttggggagggcaggttggttttctggatgaagagcggattgtctatccatagaaaatgatgagctaggtgtaggggggagctgtacttcctgggaggacacctgcccctgtggctggtgcttcttcttccccaggaaggacatcttcctgaggtgtcactgtgactcttttgggctcgaagctgcctcttcatcagatgggtctagggattcagatgctatgtcactgctgacccctggtcccctccgcagaattgtgccctgagtgatgaggtttgcatatccctcacggtgggagaaagcatagctggaacggcgggcacgagactcccggtgtacatgaggcaagggctccatggtgaaaatctcctcgctggggccctcctccaccttctcctcctgaagagcaaaggggagagcaggggaagcagactcctatgcttggctgatggctctcaggtcccccaagtaggagaggcaggattcaaagcccttggccactattgattggctacgttcttccctacccaagttgagccaattagagtcctcgactctcagtgttgagttctaaggaggactctagtcctttgcttttcaagacccactaattggccttgccctggaaactaaccctggatcagccaatcagagttattccctgggacttaactcgggaccacccaatcagagtccttccctgggacttaaccctggctcagccaatcagagtccttccccgactctggaccagccaccaggtgccttggctgccctttggtggcaaatccaggagaggtgagcctgggacagccaggtgcccagcctgtgcagtaaaggtggcaggagctgggcagggagaacagaggtggcagggcaggtacaccattccagtcaattctggggcccatctcagctgcaacttgcttttccatgcatgctttggttacgtgggctagtaagtcccctcccttttttttgaggtggggtcttgctctgttgcccagataggagtgcagtggcaaaaatcatagctcactgcagcctcaacctcccaggctcaagcaagccacctgcttcagcctctcaaagtgctgggattacaggtgtgaaccgctgcgcctggccttgagcacatgtcctcaaggtgcatccacgctgtggcctgtgtcagagcctcactccttctcacggctcaggcgtgtttcattgcacagatggagcgtgccgtgttgacccactcatctgtcaacagactcttatttctaagttcctccttttgcctaaaccatttcaaggttgtttccgtcatctcaacccccaagctctagatcattcacggtagaatctgatggtgtcagccaggcacagtgtggctcatgcctgaaatcccaacatgttatgaggccaaggcaggaggattgcgtgagcccaggagtttgaaccagcctgggcaccataatgagtctccatctctagaaaataactacaaaattagctgggcgtggtggtacatgcccgtggtctcagctacttggaaagctgaggtgggaggatcctttgagcccggaaggtcgaggctgcagtgagccgagattgtgccactgcactccagcctgggtgacagcacaagacccttctcaaaaagtaaaaataaataaataaataaaaccttaagagcccgatggcatcagcactggaatccagggcggcgtttgggtgctctctgctgctttgtcgggggagtgaggtctcccttcttgggaaatcgggccccgggggcactgggcgtgtgtccggggctccgcacccacccttcccccaagcctagtgtcttggagggccgagaggggccgggacaccttgcagtccctacgccctgcacggctccccaaccagggtcctggaatgtaccagatgaggaccccaggcccaggcccacctcaccttggcacgtagctccttgagggctgggaagatgactcggagggccaggacagggaaggtgtttatggacacactcagcaggaccaccagcaggatggagggagaggacatcacgctgaggtcggcatctggggacagggcggggtcacagcagagcctacccccagctccaaggatgcccccaggctagggagcgccttggtgcctttgtgcctggtccataaaggagcgccttccccaggacactttgccggacgactgtcatgagcaacctgcaacctcttccatcggggctcccctgcaccacgaccgcccgtcccacttccccatgggggctcacacagaaacgggaaggtcgtgggggatactctgaagagccagaagctctgggtggtggtagtcatgatggcgtagaaaccaaggctgaggaggatggtcgccacgcacagggcggtccagtacttgatgataagaatgacctggacaggcagcggtggggtaaatccggggcctagcggggcttgcaccaggacaccagcccctggggtccaggaagggcacctggcaatgcccccaaagcaggggtccccaggggaggaggcctccataggccatgtccaaggccccggggaggtgaggaccttgcccacctccatggtgatggacagcaggcaagacagggccaccacgaccgcaaaggactggtggtcgctgaagctggcgggtcccgccgtgtcgcggctgatccacagtgtcatgaagaagttgaccagagaggtggtcacaccatgggcgatggcttggacgaagacccagtagttgaagagctcgtccttctgccccaccacgtacagctccggcttctccaggctctgctctgcgctcacgtccttggggcaagcagaagctcttgggattgggtggggggcgggggacacccaacagagatcaggatctcctcgggcaggccagtagggtggccactctctgtgtgtggctctttgagtttaagtgagttaaaataaagtaaggccaggcacggtggcacacgcctgtaatctcagcactttaggaggtcaaggtgggaggatcgcttaaggccaggagtttgagaccagcctggacaacatagtgaaaccccccatctccaaaaaaaccttttaaaggagctgggtgtggtggtgcgcacctgtaatcccatctacttgggcggctgaggcaggaggatcatttgagcccaggagtggaggctgcagtgagctgtgatcgcaccactgcactccagcctgggtgagagaatgggacctcgtctacagaataaaataaaatgaaatggaaagagctctggaggttggtcacttggccacacgaacgcactaggtgatgctgggctgtgcgcatgagtctggctgaga[139 bp omitted]ctggccaacatggcgaaatcctgtctctactaaaaataaaaaaattagccgggcatggtggtgcacgcctgtaatcccagctactcaggaggctgaggca[135 bp omitted]gtaaaatccagtccctgggtcacaccagccgcaacacaagcgttcctcatgggcacgtatggctgctggcttctgtgttggattgcatagctgtgggacacttccatcatctggaacgttccatgtgacccaccctcccaaccccagatcacgtagccagggcctcttggagctgggggatgataaacctagcagagtcatctgctctgatcctctctccccattgcatggatgggtagacagaggcacgggggctccagcacagggtgggggctcccacacacaggaggagctggatggccccgggatgagcgtaggctccggtgggagaaggtcaatggcagtgggcagggagaggtactggactgcaccccctgagccccaccccatggcctgaaggtctcccaggctccctctccccgccccaaggagcggaggagaggaggagaggctaagcagagacctggaaggaagacccggccttgccctgctcacctgctcaaagagcccaatgtagagaactggcagggtgctgtacaggaggttgaaaagagccaggaaccatccttcatacaggggctgagccgggggagaagggcaaggagaacaagtcagcctccaggcacccaaggagcctgccaagcaggcacccagggagggttctgggtgaggtaactctggtcgagttacactcaaggttggggctgggactggggtggggtgaagtgcggcctgataaaggcggcaagataaagggagggaggaaagcatgatcaaattccctcataatggcacctctgagtttttgttttaattggatggcatcaaaaaaggatacaggctgggcacggtggctcacgcctataatctcagcactttggaaggccgaggcgggcagatcacttgaggtcaggagtttgatactagcctggccaacacggtgaaaccccgtctctactaaaaatataaaaagtagctgggcgtggtagcaggcgcctgtaatcccagctacttgggaggctgagacaggagaatcgcttgaacccaggagacggaggttgcagtgagccgagatcacactattgcactccagcctgggcaacaagtgtgaaactctgtctaaaaaaaaaaaaaaaaaaaaaaaaaaaaaaaaacgctgggtgcgattgctcatgcctgtaatcccagcactttgggaggctgagatgggcagatcacgaggtcaggagttcgagaccagcctggccaacatggcaaaaccctgtctctactaaaaatataaaaattagccaggcatggtggcaggtgtctgtaatctcagccactagaggggctgaggcaggaggatcacttgaacccgggaggcagaggttgcagtgagccaagatcatgccactgcacgacagcctgggcaacagagtgagactctgtctcaaaaggtaataataataaaaataaaacagaaaccaatatatacttactaaggggtttctgtaaagctccctctcaaatgcccaggtattagtgatgggagctcattccttctccaaggcacctgcttcccagcagtttccctacacgcagggaatagcactgccctggggctcctctagtccttgtcaggataccgctcagagtctggaccagagccccagctcccacaatcggatcttctctggggttcaaggtcttgttcactcaactctccccagaagaggaggtccatgtgcagtgcctgcccttgcttgaaagctctgagtgtgccgggcacggtggctcacgctgtaatcccagcactttgggaggccaaagtgagcaggtcacctgaggtcaggagttcgagaccagcctggccaacatggtgaaaccctgtctctgctaaaaatacaaaaattagccaggcgtgatggtacacgcctgtaatcccagctacttgggaggtggaggcaagagaatcacttgaacccgggaggcggaggctgcagtgagccgagatcgtgccattgcactccagcctgggtgacagagtgagactctgtctcaaaacaaaacaaaacgaaacaaatatcctggaaggtgttgggcacagagctagacagggaccgtcacctcccttcacctggactctaggcctccactaacgcagccttgccatgtggcctcaggcaagccctgtccaccgaggatcccagggttctcagtgcgtccagggctgctcctggcagctatgggaggggcagggcatccccagaggccctggtcatggggcagccagggtgggggacgcacctggccggtgaagccgttgtagcaggcaaaccagacctgcaccatcatgctggccatgctcttgtagaagaagtagcgcaggaacttgcagatccgcacgtaggaccagcggccgtgcaccagcaggaggcgctgcaggaagcagaactggccgagcacgaagtcgctgttctgaactgcctgcatgccctcctggcccgccagccccacgcccacgtccgcggctgcagggcacaagcagctggtcagccccccgcacgcccccagtcccgcccgcccccccagacccccgcactgttctgccccctatcagccccccccatctgcttcaggtccccccagtcccaccgccgcctccatcagcgcccccctcacctgccccaggtccccccagtcccaccaccgcctccgtcagccgccccccactcgtcccaggcacccccagccccgccgccgccacccactcttgatcatgttgatgtcgttggcaccgtccccgatggccagggtcaccacctggtggtacttcttgaccagggccacgatcagggccttctgcttgggcgtcacgcggcagcagatgaccgcctggcacttggacgccaggtccacgaaggcgcgctcctgcagcacctcggagctacggcgggctctggagtcctgggctggcggtgcagccagcgggagcccgaacctccggcacagcagggacaggcgcctggcgtagaggaaatccctcctggactggccgagctcctgccacgcctcgtccatgttcacgttctgcgccagggcgcgcggctccttccgcagggacaccagcagtttgtcctggccggcggggagggggctgtgccaggcgccgtggcctccaggccagactggaccctacccggccctcggcctcgccagcagtccccaccccgagcccgccgcccctccaggcccctccctggcgccgggaccccgccgtccaccctgagcgacactgaccaggaagtctccgttaatgaccaaggccagcttgacctgcgacagggactccctggttagaaggttgttactgttttcccagtaggtctccaggatgcggctgcggggcgcaggggtcagcggggcaggggagggggcgggcttctccccacttccccgggggctccactgcccctcccaccccttccactgcccactcccccacccctgccccttctcctccccacttccctcttcccctcccctttcctcctcctcccgccgctgcccctccccttcccctccactgcccactcccccacccctgcccctcccccttccctctctcctcccctctgcctcctctctcctcccctccccctccaccgcccactcccctccgctgctcccccctcccctccctctcccctccccctccctccactgcccctcccctcctccccactgcccccatccttcccctccactgcccactccctcacccctgcacctccccctcccctcccttccctctcccctcccctctcccctcccctcccttccctctcccctaccctctccctccactgcccacttcgccacccctgcccctccccctgccctcaccttccctccctcttccccctccctcctctgctcctccccctcctctgcctctccccttctccctccactgcccctcccccttccctccaagctccctccactccccattaccacactccttcctcctacccttccctcccctctcaatcccccccttcccactgtgccttgggctccccgtccagtgagacacgcacctgggtgctccttgtcctcacctccccactccccttgctcaccccccaactccccacttcttacctaatctccttctcctccagaatgagcatattctctgacagcagctcgcaggcgaagccgatgttcacagccgtttctgcgaagcagaccagctcagcgcctctgcgacccgccccgcactggctgcctgggggccacgcccactctgcccggtgaatcctggcccgaccaatggcagccacatgccccaccccctggccatggtgattggttcagagaagggcttgtaacccaggctcaccaatgagagccagccctgagattttggctgtagttctggccgggactgggctgcccagagatgtgtctgaggccaggatcagcaggcacatgtgcctaggatccacagtgccttcaggaacccacaaaatgtctcaatatctttttaaatcagaagggaaataattgaatatgtttccctgggctggctcctggccgacagagggcaccctgaaaatcactttttttttttttgacaagggctcactctgtcacccaggctggagggcagtggcgcaatcacggctcactgcagcctcaacctcctgggcataagcgagcctcctgcctcgtttctctggag[154 bp omitted]tctcctgcctcagcctcctgagtagctgggattacagatgcgcaccaccacacctggccaggcccatttttgtatttttagcagagacggggtttgaccatgttggccctgctggtctcgaacttctgacctcaagtgatccgcccgcctcggcctcccaaagtgctgggatgacaggtgtgagccttcaaacttcagggaagtttgaagacccatgctgcaggggcttagccacccggagctgcccgggactcaccctgcttgtccccggtgagcacccatattttgatgttgctcttcttgagacatttgatggtttcagggacaccgtcctggagtctgtcctcgatggctgtggctcccagcagctggtgggggaggagggcagggcggggaagatgctgagcagccgtccagctccctggcgggggcaggagagtcccagggcccccttgggtgcccccgctgcccacccaccctgaggtcctgctccatctcgttgtacacctgttgcagggcctgtgcccggttctgcagcaggaggctggcctcctggtggcgctgctgccagtcctcgtaaatgtcctcagccacctccctgtaggccaggcacagtgtccgcagggtctcctgggcaaaggcctgggggccgggcaggtggaagctgtcaccatgctgaagccgacatccgaggctcagccctccccaaccccctgccgggctccggagcctgggtcccccaaccaaaagcctgttgcctccccagccaacagcagccagaagggattcagaaaactggtctgaggccgggtacggtggctcacgcctgcaatcccagcactttgggaggctgaggcaggcggatcatttgaggccaggagtttgagaccaggttggccaacatggtgaaaccctgtctctacccaaaatacaaagattagccaggcatggtggtgggtgcctgtagtcccagctacttgagaggctgaggcaggagaattgcttgaacttgggaggcggaggttgcagcgagctgagatcacaccactgcactccagcctgggcgacaaagtgagactccatctcaaaaaaaaaaaaaaaaataga[132 bp omitted]gaaaccgcgtctccactcgaaacacataaaaaattagccaggtgtggtggcgcatgcctggaatcccagctactcaggaggctgaggtgggaggatccctcgaacctgggaggccgaggttgcagtgagctgagatcgccctatcgcactccagcctgagtatcagagcaagattctgtttcaaaaaaaaaaaaaaagaaaagaaaactgagctgcccctgctccccacctactctgtctcagacacctgctcccacccccagaccctcagctctcttttgcctccagaccttcttggaggactgtttccctgccaggaacaccttccctatgctttgcacagcaaattctttttttttttttttctcgggggtgggggatagggtctcactttgtcacccaggctggagtgcagtggcccaatcatagctcactgcagcctcgaactcctgggctcaagtgattctcctgtctctaccttccaaatagctgggatcataggcacatgccatcacacccggctaatttctttgtatatatatatattttttaaatagaggtggtttcaccatgttgcctgggctggtctcgaactccagagctcaagcaagctgcacacctgagcctcaaaacgctgagattacaggcagaagccaccacacctggcctgcatggcgaattctgactatcactcaagaccttctatgcagtccacccacccggtgccttccccagctggggctcccccagtcccaggcccctccctctgacccctcaactttggctctctgagccccttccttgggcccctcatttctcaagggccagacccagggttggggcctctaggggctgggaggaaactgggcaggcccagagagcaggcaccccaagggtggtcggggggtccccaaggaaggtgcccttacggcttcttaccccccgaccctgcccccagctttgtgctccaaggggtggccttaggtctcaaatttgtttatttatttatttttatttatttattttttg[131 bp omitted]ccaccacatctggctgattttgtagttttagtagagacagggtttcaccaggttggtcaggctggcctcgaactcctgacctcaaatgatctgcccgcctcccaaagcactgggattacaggcgtgagccatcgcgccagcctgtttattaagagacaggggtctcgccctgtcgcccaggctggagtgcagtggtgcgatcacagcttgctgtagcctccacctcctgcactcaagcgatcctcctgcctcaggctcccaaagtgctgggaccacaggcacgcgccaccatgtctgatttcccttttgttgttgatggggcacgggtccaagagcttgggcttgacacagcagaggagcttcacggacattggcagcctccgacaggccttgacccttcttccggcctcaatttacccatccattccctggggtggctgagctaagctgacctgctgagctcctgggctctaggtcattattgtgaccgcacttccagttcagagtgcccccacatcctggcagagcaggggacacaggacatcttcccacacacaccccgctgccctgtgctccatgctgctggggccccagcagaacctgtgaggagcccccaggctggacgcagaatcctctggccctgtagggtcagggctggaccagggggaggcagcctggggtgatgacagccccatgttggcagggggtggggcaggaaaggccccatgtgtggggagcttgtggctgagtcatgaggacaccgaaagcttctgaatgacaaaggtgcagggaagaccctcccagcacaggaaacagcatgtgcaaaggtgccaaggcagcacctgagagtggggaagtcacaagccagaaactgggtcctagggagtcccttggtgaggccaaagagagaccaggctggagaggtcagcaggggacagaaaaagcctcaaatcctgggccgaggagttcgggcttcccccacagagtgggaagctttggagcagacggagctgagtgtgtcctggcagctgggccagctcaaccgcacggtcgtcttgtgcaaatgagaaaaatacacccttggccgggcgcggtggcctacgcctgtaatcccagcactttgagagggcgaggcgggtggatcacctgaggtcacgagttggagaccagcctggcaacatggtgaaaccccatctctactaaaaatacaaaattggccgggcgtggtggcgggcgcctgtagtctcagctactcaggaggctgaggcaggaggatagcttaagcctgggaggcagaggttgcagtgactcaagattgcaccattgcactccagcctgggcaacagtgcaagactccctctcaaaaaagaaaaggcaggctgggcgcgatggctcatgtctgtaatcccagcactttgggaggccaagggggcagatcacctgaggtcaggagttcaagaccagcctggcccacatggcgaaaacccatctctactaaaaatattaaaattagctgggtgcactggcgtgtgcctgtaattccagctcctcgggaggctgaggcaggagaatcacttgaacccgggaggcggaggttgcagcgagccaagactgtgccactgcactccagcctgggcgacagagcaagactctgtctcaaagaaaagaaaagaaagacaagacaagaaaaagaaaaagacgctctctctctgggggctacacttgggagttcagctgcctcccagccggtgtgtgtgtgttttgtgtgttgccgggggagggtgttttgtacagtgcacaacatacctcactgtacatagccatcccaggtacctgcagccttccatttctccgtacagtctcctcccctgcctcctcctcctcctgtccctacacacacacacacacacacacacacacacacacacacacacacacacacacacacacacacataagccagccttcctgaagggactcacagccaaggcctcctctgtggcaaattccattgcccccctcctgtgcaagcgttcgaagatgaccgtgtcggcgcccttggtgtacaggcagatggcgccctctggctttcgaactgtgggggaacaggccctgctgcccacagaggctccccgtctgcccgccccaccttggggggcccagggcttgggtggcggggctcacccagcaccgacatccgtttgcgcgtgctgttgaagtccattatggccaggacctggtagacccgttcctcccccagctccatgatcgtgacggtgtcctgggtgcgggacaggaacacgtagccgaagttccgggctgcggtgaccagcgccccctcgtcgggggaggccgcctggtacaacagctggtctggtagggaggggggccattttggggtcacgtggtggagcccgtctccatctccacagtgcagggaggagatgggtatcgcctgggctacacctttattgatggtggccggggacccccgcctgtacaacccaatgcatggaggtgagcacttgagactagacgaccttcccgctcaacaacagatcctcgggctccgaccgcaggcctggacatcctttagccctgacgatgacacgtccgccctcccgccacgatgcttgtcagcactgtctgggctccaggcccggacgccctcgaggtgcggctggtgtcacaccggcctcagcgccccccaagccagctgaaagccctggaagatgggccgggtgagctgcggggctggggacactgccgtgccccgggggctgagcggcctcagagatggggaggtgggtgggcgcacctgggcgctcacgggggctctcccgcaccatcaccgtgtggcagatggccagcaggcgccagaactcccgcacggcctcgtccccgttggtccgcacgaggtgcagcagggccgcattgtggaagagcagcttcccgtcggcgaacttgttccagaggtaggggttctcctgggggtggcgggggcacgggccggctgtgggtgggccgctccccgtgccccgtccccctcaccgtcccgcgctgcaagccaggcaggctcaccttaggtcgggtcgtggcctctgaatccggccctggggaaagacacagcttcctgcttcagctcccacaggccccccattcgggatcccatagcccctgacccctagtttcaggcttccgggggccactggtgcagccacacaagccaggcctgtggccctggaaccgacaccccgagcaatcttggggcgaaagctgacctcagtttccaccacctgcagaaagcggggaagaggggagcacacccatcctgtctcccagggaccccaaaaggacagcctggagccggatgcggccccgtcccgtctcccagggaccccaaaaggacagcctggagcgggatgcgggctagggaccccaaaaggacagcctggagcgggatgtggccccttcctgtctcccagggaccccaaaaggacagcctggagcgggatgcagccccatccgtgggacacactttgtttcctcctcctggggtttttgttcttttttatttttatttatttatttatttatttatttatttatttatttatttatttttgagacagagtcctgctctgtcgcccagactggagtgcagtggcacaagctcagctcactgcaacctcagcctcctgggttcaagtgactctcctgtctcagcctcccgagtagctgggattacaagctcatgtcaccacgcctggctcatttttgtatttttagtagagatggggtttcaccatgttggccaggctggtctcaaactcctgacctccagtgatccgcccgcctcagcctcccaaagtgctgggattacaggcgtagccaccgcacccagccactttttatgctttattgttcttagaaatggggtcctactctgtggcccaggctgcagtgcagtggtgcgatcatagctcactgcagcctcaacctcccgggctcaagacatcttccctcttcagccttccaagttgctggggcaacaggtgcatgccacccctttgtggtgtcttttgtgtgtgtgtgtgatggagtctctctctatcacccaggctgctggagtgcagtggcgtgaccttggctcactgcaacctccacctccgggttcaagcagttctcctgcctcagcctcctgagtagctgggactacaggtgcctgccaccatgcctggctaatttttgtatttttagtagagacggggttttgtcatgttggccaggctgctctcgaactcctgacctcaggtgatccacccgcctcaacctcgggcccatttttctatagctgaacttgaaccatttcttggggacttctcactacactaaattatgacccagtccaaaccacgtgccctggttataaattagacccggggctgtcaaactacaccccaccacatcatcaatttttgtacggcctgcgagctaagaattgtttttggatttttaatgg[187 bp omitted]gtggcgggcgcctgtagtcccagctacttgggaggc[160 bp omitted]actcagcaattcgaatttcagcatccacaaataaaggcttgtgaaagtcaaaagaagagcagtggccgggtgtggtggctcacatctgtaattccagtgctttgaaaagcggaggcaggcggatcgcttaagcccaggagttcaagaccagcctgggcaacatagggattccctgtcttgacaaaaaatacaaaaataagctgggtaaggtggcactctcctgtagtcccggctacttgggaagctgaagtgggaggattgcttgagcccaggaattcgaggctgcaataagctatgattgcaccactgcattccagcctgggcggcagagcaagaccccatctcaaaaaataaataaatacacactgtttaaaagtttggctaggtgtggtggctcatgcctgcaatgccaatattttggaggctgaggcaggcagatcacctgaagtcaggagttcgagaccagcctgggaaacagggtgaaaccccatctctactgaaaaaaaaaatacaaaaattagccaggcggggtggcacgcaactgtaatcccagctacttgggaggctgaggcgggagaatcaacccaggaggcggaggtttcagtgagcagagatcgcaccactgcactccagcctgggcaacgag[143 bp omitted]gaaaccccatctctgctaaaaatacaaaaaaattaggtgtggtggcaggtgcctgtaatcccagctactcgggaggctgagccaggagaatcgcttgaacctgggaggtggagattgcagtgagccaagattgcaccactgcattcctgcctgggtagacagagtgagactctgcctcaaaaaaaaaaaaaaattttcctggccccctccaaaggaaaccaggccatctggctacggttccctggttcagattcgggcggaggtgctgggcatggggccagacgtggctctggttctcaggcaccctgagccccttgaagatcgaggacccagctgggagctcaggtgtcggggccgcaccatagacgcggccgctgatgcagcacttgttgaaggtcaagatgttctgcgtgagcgtgcccgtcttgtccgagaagatgtattccacctggcccaggtggtcgttgaggctggtgctgcgggccttggcaggcacgtcctgcggcttgtagtacatctgcacgtcccagtcgatgaagacgctgttccccaggtagatgaactcggacctgcagaggcactcagggtcacggtcagccccgcctgctgtgtgccatccccatgcctccccgttccgcgtttgcaccggggacgcagccggcggagactcacaggatgaacatggacatcgggatggtgacgctgagcaggatgaggaagctccagaagacgaagaaggactctgcggccacgctgctcccatgcacccccgagaggtagtagtggtggtctttgaattctttgactgagaaaccgaagccgaaggccaacaccaggcagacaagcaccacggagatgaagatctggaaggcagacgcgacagggtgggtgaggggggcgggggtcccccactctgccatcaggatggggtaaacacaaagataaggctggggctgggcacagtggctcatgcctgtaatctcagcacttcaggaggctaaggcaggcggatggcttgacgtcaggagttcaagaccagcctgggcgacaaagtgagacctcatctcgacgaaaaacttaaaaaataaattagtcaggcatggtggcgcacacctgtagtctcagctgctcagaaggctgaggccgaggatcgcttgagcccaggaggctgcagtgagatatcatggcgccactg[133 bp omitted]gcctcccgggttcacaccattctcctgcctc[133 bp omitted]cagcctcccaaggtgctgggattacaggtgtgagccactgcacccagccgaaaaacatttatttatttttatttttatttatttatttattgagacagagtcttgctcagttgtccaggctggagtgcagtggtgcaatctcagctcactgcaacctccacctctggggttcaagcgattctcctgcctcagcctcccaagtagctgggattacaggtgtgagccaccacgcccagctaattttcgattttctgtagagacggggtttcaccatgttgttcaggctggtctcaaactcccaacctcaggtgattcacccacctcggccccagaacgtgctgggattacaggcatgagccatctcacccagcctaaaaatatatttattctggccaggcacggtggctcatgcctgtaatcctagcactttgggaggctgaggagggcggattgcttgagctcaggagttcgagaccagcctgggcaacatggtaaaactccgtctctactaaaatacaaaaaaattagccaggcgtggcggcgtgcacctatagtcccagctactcgaggggctgaggcaggagacttgcttgaacccgggaggcagaggttgcagtgagccaagatcacgccactgcactccggcctggtgacagagtgagactccatctctaaaaaataaataaatacataattattattattttataaaactttttaaaaaattactttaatgaaaaattttctggcccaaagacctgcccacaggatcaggccgcacattttgcagaagaaggaaactgaggcctggaagatgacatccctgaccctgcactcctctgtgttcctggggcaggggcacttgttggcagctcaccacaaccaccagcttgttcatcaggaggtccagcttggttctcttcaaatggatcttgccacagttcttcataatttttgtgtcaaaacctacaaacatgtatccatctatccacccacccacccacccatccacccctcacccacccatcactcacccatccacccactcccccactcatccacccacctacccatccacccctcacccacccatcactcacccatccacccctcacccacccatcactcacccacccacccttccacccctacccacccatcactcacccatccacccaccccccactcatccacccacccacccacccatccccacatccaggcacccacccacccacccatccccacatccatccacccacccatctgcccatctatttgtctatccatccatgcactcatcctctcacacatccatccacccacctacccacccacccatccccacatccatctaccacgctcccatcagtacagctcccactccaggaccctggagcagccgtaccagcataaatgaccagtccatagcaggtgtctgtgttgcgaatcctgcagcctcggaggaggaggttgccaatgtccagggagtatttcttgtcattccattccaggcaccccacgaagtggtgcatccgactgttaggcgcctcacacgtcactgtgcctgtgggtggccaggtggtcagtgggtcagtgggctcaggccctcctccccaggttccctgcaccgggtgcaggtgagaacattccggccaccctcacgagcccctctgtgccccaaacttgccctatggtgccccagcactgggctgcctccaaagccttcctgtccccacctggcctcagggactttgggcaggctgttccttccacggggactcacacttccctgatcctccagccagatcagcccctcctagctcctagctccctccctcgtggttctgatcccagcatgtgacgagacatttatctgtgcaaagctattgttaatgtctgtgaactccatgagaactggtgccagcctcatctcggccacactctgaccccagggcacggaccagcacctgcatgcagtaggtgctcaataaatgtgtcaagagggaagaggagaagggacgcctgatcgatgagcctccttttgggtgccggagcctgtctaccaccaccaccagccccccattcaccaacaccctgcaatggcctcacttcattggagaactgcacagactggcccggggcagcattcagtgagggttaaaatgacaatggggcatgggttgggaccccagaagagagaggggccacagggttcctgaagggtcctcacctgcctccccatcgcgtcttagggatggggaccctgactccatcctggatgcaggaattggagacgctcatggtgggacggccagagggcagagaaccacagggcaagcccacacctcaggccacctctctgaacctcagtgtcttcctctgaaaaatgggtctatgcccagtgagaatgctggggcagatggacgaggccagggcccacaaaagcctccttgctcagcccgggaggaaatgctagaggaagagccgctgcctgtctatgagtctgtgtcccagtggtgttaaagaaggaagccggccgggtgcggtggctatgcctgccatcccagcaatttcagaggccgaggcgggtggatcacctgaggtcaggagttcgagaccagcctcaccaacatggtgaaaccccgtctctactgaaaatacaaaattagctgggcgtggtggcgggcgcctgggatcccagctgctcgggaggctgaggcaggagaatcgcttgaacccgggaggcg[141 bp omitted]tgtggccccctccaccagggctaagcctttccccagatatcacagacagatggggaaaacctctttgggtgtcaggagcaaggaaaagattctgtcctcaaaccaattagagtgactctccttcacaataagataagaaaaccaaacaaaactgtacccccagactgggctgcagcaaagagtaactgtttccacatcacgtgtgaaacatctccaggtggaaaataagaaaccgtcaagcaggccgggtgtggtggctcacacctgtcaccccagaactttgtgaggccaaggtgggtggatcacctgaggtgaggagttcgagaccagcctgaccaatatgatgaaaccccgtctcggccgggtgcggtggctcatgcctgtaatcccaacactttgggaagccgaggcaggtggatcacaaggtcaggagatcgagaccatcctggctaacacggtgaaaccctgtatctactaaaaatacaaaaaattagccagcctggtggcgggcgcctgtagtcccagctactcggaaggctgaggcaggagaatggcgtgaacccaggaggcggagcttgcagtgagccgagattgcgccactgcactccagcctgggcaacagagcgagactccgtctcaaaaaaaaaaaagaaaaaagaaaccccgtctctattaaaaatacaaaaattagctgggagtggtggcacgcacctgtaatcccagctactcaggaggctgaggcaggagaaacgcttgaacctgggaggcagaggttgcagtgagccaagatcgcaccactgcactccagcctgggagacaagagcgaaactccgtctcaaaaaaagaaaaagaaaaagaaacagccaagcattggaggtgtcagcactctgttctcagaggccttcccaccacaggaattgccagcccatgcacgcaggtgccttttcaatgaaacaaccaaacgtgactgtgttatggttaaattttacacttaatagaatgtagcactttatttttggttttgacacaggggtctcactctgttgcccaggctgagtgcagtgatgtgatcacagctcactgcagcctcagcctccctgagctcaagcgagcctcccacctcagcctcccaagtagctgggaccaccggcatgtgccaccacgcccagctacttgttttatttttgtagagatggggtctcgttatgttgtccaggctggtcttgaattcctgggctgaagtgattctcctgcctcagcctcccaaagtgctgggattccaggtgtgagccactgggcctggccagcaccttgttttaaaaacagtaataacaacaacaaaataccctaacttttaacttttacagattcgagggacgtgactccctgctcaacgcctctcaccttgaaaggacgccatcttctttatagtggccagttctttgtgggtgaccatcagggcctgtctgaacttcaagttggtctccctggtgacgaggagaggagggaggtgaaagtggagttgatggatgcttcgaggagcccccagaccccttctggagtcactcaaacattttcactgagcacctactagttcgccagctgccagtcagatggctgaggcccagagagggagaaggccttgcccaaggccacacagcacatttgcaaagtgctgaggccagggcctagggcctagggcctcctgcccgtatgcacacaatggaaacaatggggagggtgggcgtcttcctcccctcagtgcctggcagcacccacgccccagacactcatggggtgagtgaccaaagtctctgagcgaccttggctggccgcctccttggtgactggggaagggggctcctccgggccatgctccccaccccccagggtccccagcgatgccacagctcctcacccgtcaatgtccaccgtctccacatagcacaggctgctgggctccgtgctggccagcaagagcatgtcggcctggtgtggagtggggggcagcgttgcaagaggggatgcaagacaaattgggggtgcggcagccctccccaccctgggaggggtgctctcggtgagggggcgcgtggttctgggacctcggggtcaaccccagctcactgggacgatgttgtccttgcggagacagaccacatcccccacgcacagatcctgccatttcttctgcttgaagctgcggggagagggggttgtgaaggaggcccctccctctgccaaccctccccacaccgggagaccagaggcacgggatgacggggggcccgcagctgcagtccccacctccgggcctttgccccctcaggaagccttccccgggctcccaccccactccccgcgggtccacgctcccacccagtgacctccagggtcctgcacccacgtcctcttcagactttccttgtcctccccatcgcccgagccctaagctctgcaagggttcgccatcagggcctcggcctctgtcctcgtcccggccaaacgcctaatgaatgcaggcccggttcctgtcggactcaaccagccgggagatcagggagcacggaaggtgatggacacttgccgaggccgatgaccctgctgggctggagcccccgtgtccccgcggatccccagctgcagccccagcctcacctcttccccatcagaatctggcagggtctgttgttgatggctctgtcactcttgtgtctcccctgggccaggagggaaaggatcagagagaccgtccagcctctcctgcccccgcccaggccgctgccgcactgcagcccagcagtgcccgcccgcaacacggggtccctgtccgctggccccacgccacgttgcgtctgctcagggatcccggacgtgggggccactggacccactgctattggcggggagaagacaggcgtgctgcccaccacctagagtgcctgccagaccaccccccaccaaagctcaatggccccaaaaccacgcaccgacagagccaacgccacctgcggcacctgcccaatgtgggtgctagcagataaggacaatgtagccccagcagctgaggctcccaggcccacgttcccctaatgctccaggaagcccagccctcctcccactctcgcccagggatcaagagacccccccgaccggccccgctccctcccccaggcagctgcatccaacagcactcaccatgtcgtccaccaggtcccgggtggcacggatgaagaggaggcagaccataggggtactgagcgagaaccagggcagcgtggagatgtcgggaatgctctgacgtgagggggccacaggaagggtcacaccagcccactcccccgtcccctgcccttccaccaagccgacctagccccgcactcgacaccacgtgacacatctgctggccaccttgaccggggtccagccatctcctgcaacccccagccctcgggacaaacgccccggcatccctccacctgcctggaacttctcccacacgcctcgtctccccagcaaactccccttctcccgtccaagcccagctcccacggtgccttctccagggagcctcccccagccccaagcttggccgccactgctccccctccctcccatgtccctgcttccccaggtcaccctgcaggtgtgagctccaccatcccctaccctggcacccggccagcggcctgcacacagtaggtactccattaatgctgaatgactcgatggatgaaaggagaacctctccatccagaacagaaatgagatgttgggtgagagtgtttgctctgaaaacagcgcccctggccggatgccggccccacgctggcctggaccacccaggtaccgggaagtggctccacaggtcctgagaacatgctctgggctcctccttccccctcgcctctgaggtcagctgggagggcgggggccaggggagctgcgtggccgaggccgtttaggctggggaacagctatgcctcccgatgcccagccctgcccagcaggaaccagcggggcgtggagagggtgccgtcatcagacctggagggtgcatccatccacctttgtcattcaacatgtactgagcgcctcttgtgtgccaggccctgggcagggtagtagggactcagcgctgagggtcccagtctgtggggagtgggacgtgaacccacccatcacacagacaaacacatcgatgctgccaggtggctaggggggacttcctggaggaggcaacacgcctcacctgcaggatgatgatgatgaggaagaacaggttggacacgcggtggaactgctcgtacaggttcagcggcaggaacgagtagaagttgtacttggccgtgcggatgacattggtctggaacgagagccgcgggctgcctggcagaggggtgccatccaggccaggggatgggggtgcccgaggccagacctgcctcacttggcctcgcccagcatcctctgggctatgggacacacaccattcattaagcatctactgagccagcagttactgagcacctgctgaatgcaaggcctcagaccagcatttactgagcacctgctgaatgcaaggcctcaggccagcatttactgagcacctgctgaatgcaaggcctcagaccagcatttactgagcacctgctcagtaatgtaaaagcctggagccagcattaatcaagcttctactgagtgcaaagactcatggagctgtgaccagcatttcccaaagcaagacacccaagaggatttcaggtagggccgcgatggacacattgtactttcaggttgggtattaactgaccctcacgtgcactgggacagggcaaatgagacacacagaactcttgtgccaaaccagtgatttggttaggacgggcggttcggtcctcgagatgaaaataaaaatatcggccagacatggtggctcacccctgtaatcccagcatttcgggaggtcaaggtgggtggatcacttgaggtcaggagttccagaccagcctggccaacatgacaaaaccccatctctactaaagatgcaaaaaattagccgggcgtggttgtgggtgcctgtaatcccagctacttgggagtctcaggcaggagaatcactagaacccgggaggcagaggttgcagtgagccgagatctcgccactgcattccagcctgggcgacagagcgagactcc[134 bp omitted]tgaaactgtctctactaaaaatacaaaaattagtcaggcgtggtggtgcatgcctgtaatcccagctacttgggaggctgaggcaggagaattgcttgaaccccggaggtggaggttgcagtgagccgagatgtcgccactgcactccagcctgggcaacagagggagactctgtctcaaaaaaaaaaaagaaagaaagaaaaagaaaacgaaaaccaaaaaaagaaaactatcgagcaaatacaagcagaggcaggactcaggaggagcaaaaaatagattccccgagggtaccacggcagctcctctggagcagggaggcgcgggaggggccgcccaccttgtatttcttcctttgccagcacaggatcaccttctccttgaactgcccgttgtaggcacggttgttggcctggaccttccaggtgaatgctgcagcgagagagccgggcgtcgctggagctcgaggcccaggacaaacacccctaatgaccgcccggaggagggctcatggggcccgtgggacccaggcactggggaggcccgagatgtcagagcccgtaaacagacagtcgggcagcaggcaccacctggggacctaccagaccctgcccatagttggcgccggcacaagtggattccgagagtggccacccacacccccagccaggggcctgtcctgagacgcagagaacaggccctgggagaccgttcaggcctgtacattttacagaggggggtaaactgaggcttggtgatgggctcttgggtgtccaaggccatacatccagctggcggcccagatctttctgggcatgcagcccccaaatcctgagccaaatcccccaaacccagtcagtactagggttggagactactagaaaccaaatgagaatcctaggcaaggcctgacgtgcaggtctgggggccccagcccgtctcagcctcagccctgcacttttttcttttttttgagatggagtctcgctctgtcacccaggctggagtgcagtagcacaatcgcagctcactgcaacctccacctcctgggtctcctgggttcaagtgattctcctgtctcagcctcccaagtagctagaattacaggcatacgccaccacgcccagctaatcttcgtacttttagtagaaacggggtttctccatgttgcccaggctctcgaacccctgacctcaagtgatccacccgcctcagcctcccaaagtgccgggattacaggggagagccaccacgcctggccagccctgaacttcataatccctcccacctgcaccgccccctctgcccaggatcagcacctgagttcctgtcctcatcttggagatcttctctctggccgaggctgcccatgctggtggggctgtgggagagaagggccccgggtcacagcagtgaccccagcccttgctgggcaccactcggtcttcaaggagctcacagcctaggggccgaccctctcaaatgctacctcccacactcatctgcagcctccccgccaggctctgaatgtccagccataggctgtgtgtcttgccttggacatcctgagacctaggggaccccaagatgatcctcaaacctgcaacagcccatctgccagtgtcccccgccagccaccctggtcgcctcccgccagtacagcctagaaggactctaccgccagccatgccagcctctggccatgccagcctccggccactgctccccacacctcgcttttcctgaaaggaccactctcacctcctcctggtttcactgacggcctcctgcccctctccccatgtggcaccagcttaggggctcagtcatctgttcactgactgaatgggacccccgggctatatgttatatctcaaaacacagcatgagggtcaggcatggccactcccctcctcacccccccaggctgggcagcaaactctgatgggggcgatggaggcagacggacatcgtcagaagatcctggaatcttctccactagcaggttcaggaatgtgggtctggctctagccctgcaccgggggccctggtttggccccctatgaggatgggcaaaccacccctagacgccagcaactggccccccacctgccagctctctagcagtgccctccccgccaagcccctgcccctgtgttccggccacccgatgcacccgtcctcacccttctggtctccattcatacttcctagcccggccaggctgggccttgtgcctcctctcaggtgcccctctgcctggggagtctcccatcccagctctgatcaccgtctcacctccgcggatgccagcaggacctgagccttcctgagtcacgtctgagtcacccgtgtccccaggtcctggtggggcagggcttggctcagggccagctctggtgctcctgggagtctgagcggggccagtgcccattcaccgcatgaggaaaagggaggttcagggcgaagaggggtttaggctgtgggacgggggagaggtgggggagacccccgtgggggcagactggggattggagagttggagagaatgctcaaatggccagaatccactcgaagtgtatctgggggcagaaagagacacggacacagcgctggcttcctgccccctcactaactgggatgccccattactcggaagccccccaccccgtcttcccgcagccgcaggggcacaggaccgccctggacagggctccagagtccagggctgtctgcacccgccccggggccccgaccgcgcgaacctctaggggcgcgctctccacccccgccgccacgaccccagctctcagcctgggtggagcccagagagggtgcgcgggctcccggggacgcacagcagtgggagcacccgccgctcaccggcgcaggagaggcaggggggggcaggccgcgggcgtccagggcggcggacgtggtggaaccgttagcccggtgccaacggtcctgaaacggggggcgggatctcggggcggggcctcggggcccggccaaggcgaaggtggagccagttcggaccccggaagggggccgggggcggggcctggagggggtgggtggggccaaggcgaagaaggggcggggcctcgagggtggggccgagcggagcacggccgagcaggatgggggccaggcctcagggacgcggtcacggccgaagggcggggcctcgcagagcctcgcagaacaggccgggatagaagacgctcgggagcagtgcctgggtctggggaggggccgggactttggggaagggactagaaggaaggcgaggacgagcggggtctcgctgagcaaagtcagagtaggggcggggccaggactcaggggcttggccagagcgggaagcggggttgagcatggccttgcggagcagtgttatggtaggggcggggctgggatccggagccgttacaaaggaggaaggcggggccgcgcagagcagggtcagggtaggagggcgctcagggtgggtccaggacagaaggcagggccttgggagggccttagggagcagtgccagtgcaggggcggagcctgaaagggaagagggtgtcagggcagggccgggccgggcttggtcagggagcagaaagaacctgcaccgcagggcggggttggaagggttcttggaaaggtgggcctgggtcaggtcggaatgggccttgcagacctgacggggctgaggctggtgcggccagcgtggcagagtgcaggaggaaggaccacaggtaacggcggttatgtaagtcatgtctgatccgtgtcctgggttcgttcattcatcccatacacgttcaacgagcgcctcctaggcgcagatgcagggctgagcaccaggctggggagaggcggttatagccattgagaccaccctaaggccaagaggaagcccgcagggttctttccagcaggtggcaggggctcagggatccttactgaagaagtggcaggggtgagttcagcgacgaggctagggcgggtccaggccagcgatagggcctggagccagggtcagaaagtgtgtgcggaggggctgctgaagatgaaatgcccccaagagtgaggctacctggggtgagggcccaaagggagaggcaaacatgggtggagggggatagggaagccacctcccccatcaaagcggcaaccacctgagggctctcggtgatcacaaaccctctttctttggaagcccaaattggaagcctgcttggccctggaggctgccagggaacctctctttttttggagacagagtctcactgtgtcacccgggctggagtgcagtggtgcgatcagagctcactgcagcctccacctcctgggctcaagcgatcctcctgcctcagcctccagagtagctgggaccacaagcaggcaggcaggccactgtgtttgacttctctcctttcattccttcaacacttcccctgtgcttgcttgcttgctcagtggttacgaaaaaaagccggggctgggagtttgaacacactgttctaataaactttagaagagacctggttgggtgcagctgtgaggaccagattcccccaccccagccttcgcagggggcactatctgggggcaggagcttgcccagggcacttgtgcaaaggccctgaagcctccagtggcaacaggtggcttcacaagctgaagggagtccctgggggctgaagccagggctggccagccttgggaccccccgtgggctatgtcctgaggcaccaggtgcgttctgggaagggggaggcagacatcacatgggaatgcacagaaacagagcgcatacacgcctgcgccatttatttagaacacagagccgggcacagtggctcatgcctgtaatcccaacgctttgggaggccgaggcaggtggatcacttgaggtcaggagttcgagaccagcttggccaacgtggtgaaaccccatctctactaaaaatacgaaattagccaggtgtgatggcacagccataatcccagctactcggcagacagaggttgcagccagctgagactgggtgacaaagcgagactgtgtctcaaaaataaagaagaaaaagaaaacaactcctttacagaagaggtgggagagtcactagtcacaagaacagccctcgagggtggaagggcctggcctaaccacggtcccccaggagggccctggagagatgcagagcccagaaccgggaagggagccttgggatggagtcctctggggagggcccccacgtcctcatcccgggacctgtgcccttggccttgcccttcagcagaagcccaagaccagggtggcaggaaacccactccaggcaacctgcccccagctgctgggtcctgtcccgcaaggctcatcactttttctacttgaggtcaataaaaagtggggcctaaacacccctgggcctcccatttccaaatggggtcccgatgcaaccacagttgcccgagacgtgcgtgcactacacaatgtgtggcgtttcctggcaagggccggagcagctttccgtgtctgcactccatcctttgacgggcaacacacagcagctcccagtctctttaaccccctctcaccatctgtgtgcagtccctatctctgggcagggcagagagggaagccagctctgtgcacagggcccagctccacacagggctggggacaccacccactgtccgagaggcactagaagctgcaggatggtggcccatgatctggggctggaactgggaccccacagcaggtgtggcccagccctgggggagccagccctgggccagcttttgtgagggaaagtttcactgctctgttttctctgcgttgatgggaagagaatcagtcccggctgcagggacagtggcctccccggggcacatgcagaggcctcaccaggcaccaagaccaagaccaccacaaaatctaaaatccatacaaacatttattctgtccctgcctggaggtgagggggaagggggtccggagagccccgcagaggaggacggggctctagcgggaagacagtgtccggaggccggtgggctccctctagacggcagaccctggggctaacgaggggccagctgggttctcagaggtcacggagtgcaggggtggggcggcgagtggtggaagccggcgcccccgaagaccggccagcccctggagcacagaggcgggtccagcccacactgcgctgagtgtggccctggcccccactggggtctgtcccacccccaccccgcaggagggaaggcagcaggcccgctcttcccggtgggaaagatgctgtgcaagtcatcaggtttaaattaaaaataataaaaataacaatacaaaataaaaaaagactgtctcaaacaaacctgggacaagcccgccccgcgacccacgtgaggagcagaggtgccggccaccacccgggagggagggcctggcaggaggggcaggaggggctgcgggccgggtgggggcgggctctgtcctggtctccatcagcagcagtttctagagacgccagagggctggggggcagagggtggggaccggcggaggggtgcggcaggacgtgagcgggggtgggctgggctgggcgttctctggccgccagctcatcccgctgctctgggctgcctcggccaggtggacgggttaccggagatttattgcactgttttggaagaggcatggggctaaggaccagcgggacggcaggagaggcgggtgggaggcgggcaggcgtcatcgcttggtcttggcgtcttctcgaaccttccagatcaccaggtgcatgcaggcgccggcgtcctcgctggagctgtgcccatccactgcggggcagatgcggtgagcacccggcccctgcgcagggacggccccagggcaggcaccggcactcaccattgtcctggatgatctgtctgaggtagtcggccatgaggttccgcagggaccgcttgtaggggaggcccaggcggtgggggaagagcacagacgtgtccaccacggtgctgtggatgacctgtgggcagcggcagagatcagcgcacgtggggcctgcgcaggtcctgctggagaaccgcgcgggacccgggccggcagggcaccttcagggccaggaggtcgctctccaggctgtgtccgatgaggatggtgtcagcgctgaacatgctcagcagaacggcctggacgtcacgcagcgtgacacttgtgtcggcaaggtcagcctccgtcacccccgaaaacctgggggaacgggcaggaggggcaccagggctcagcctggaagcactggctggtggggcgggggagggtgggtccctggggagaggcggctgggagggctcccagctcgtggagggcactggccacacctggtgttgtagtccacgatctcgttgtcaggcttcacgaaggtgtcataaaccacgtgcacgtccgtgtcgaccaccgtgacgcgcgtcagctccaggccatatgtggtgtaggactgcgggcaagggatgcacctcagatgtgtcccaggcaccggcctccctccctccccttccctgcccctttgagtctccagagcccctccaggcagaggcagtgaccagagactctgtgggacttctaggagaggccgagtggggtgtgacctcagtaaccccctttcgcaaagccctcctgcctcccattcagaggcagagccggggcccagtgcccggtgtgcttggctctgctgggaagtatggggtgttggtccagggcaggagccacaggcaccggtgctgcgagagaaaccctgagcgctggccggtgagccaggcccagatggggccagatggggcggccgcaccaggccaggtcctccccaatcctgaacccgacgctgggcagagaacagcctcaccatctcgcagtccagggcgtagatccccgggtgggtgtctcctgagagctctttctcaaaggtcttcacgaagccctcaaggcgctccttccggccatcctgcacgtgttgctgggggtggagaaggcaggtgagggcagcttcggggtgcagtgggggcgggggtggcagcagcagcacatctctgagcccttcgggaccatcctatccatccatcacgcccattcactggttgggaccctggtgagcaggtggggaagggggcttgccaagaagacacagggaggacggcttcccaggatgggaagtggccagggacagggcctggggcctacgggtgctacgttctctgggtaacacaagaaaggctgcccgggggcccagaccctgagcccaggactgtgctgtgtcccgagaccccacaccaacgatggggaggcagaagtctgttgagaacaggcagaggggactgggacgccagggctcacctttgcgacttggcagccgacagagccggcggcagccgagcagcacatgtactgggtctcccagcctccggccactgcaggggacacagacacacagtcagggcccggccaggcccactccacagcccccggggcactgaccacctgcatctaccgagccctactagggagtgaggactgaggacaggaggcctcagcctcttggtggagctggaagcagaccaggccccggcagtcgtgtggcagccaggacgcccaggcctggatccagggagaccagtgccctctgcagaggcctcttggcagcgctgccccgggcagcaccctccaggtatccctgaggcgatggctttaggggccgccacagggctgtgcaaggctggccatgtgccctgagcgtggctgcgtggttgcctgggggattgaatagaaccaccaggccaagggtgggacaagcccctccgctcctggggccagcaacctccacatttccatggaccaagggcacaggaaggcagggacacagggcctttcaggtggtggcatttgaaccttgtcatgggaaagctcttgtcttacttttgcataaagaacaggtggagagaaaatgaggccaagggctagccccggctctgccaaagacggtgcagcccagggaccctgagtgggatggagggcctgggtaaagccttaccccagttctgggggcctcaagggagggcccaggttccgggggccatgggtgggaaggggaaggacccgggtaaggccttaccccggttccggcgcagccgtccccagtggtaataacactcctcgtcccggatgcagcggcctgaagaggacacgaggtactcggtgccacagcggcagcaggtcctgcaggaagctgtgggtggggacccaggtggaagctgaggctcacgctggggcccgcatgcccggccttgcccacatcccgcacctgcccacctaggccgtcgcaggccagcgactcacagtccttgggcctcttctcctcagctgtgaagatgattgcgcccccgggccgctctgggtgcgggaaggggtagccgttctccttgagctggtcctgggtgagcaggtactccctgaggcggctgtacagggcagcccctgtggacaggcacagtggtcagcccctgcctgggatggcccacggggcggtagacaccaccgggaaaggcggctgggccggcaggggcccacgaagcaccgtgtggcacagcaggggctgggccggcagaggcccacgaagcaccgtgtggcagagcaggggcagggccttacctttcaggtcctccacccgggggctgcttggacggctgagcgagaagctggtcttggcggccaacctgccccccaacaccacctcgtgggacacaaccctgcggccactggtttctggaaggaagggagggaggggaggagggtgtgaagtagctggctcagacccctgccccgcctgctctcccacccaccctgccctcctcagacctctgcctcaactccccctttctgggacagcaccccactgaccccgggttccagcctgacccgaacaggagaggcagacatgcggtgagccagggacgcagggcagccgccagctctgcaggccccagagctgcacggaggccccacacccaaagtcttcgtcccctcccctcaagcgaagggggaagggcggggagaacagcacgggggatctaatggctttcgagggctttgagccttcatgggccacccagcctgcgacgccaacccagggcccctccgagtgctaatgcaggcggggacgggggcaggggccggtgatagcttaatgcagcctggagaggctgcaatgaaacgcccaggtctccgctttcttcctccccagagcttaatgcatggagctcgcccagccctgggcctcctgctttgaagaagctgccgcagctccattagcaggcggcccctcggctcggcttggagaccccactcagcggaggaaggcggctgacagcgaggacaccagggccaggtccgtcctacacagaagcctgggaaccaggcagcaggcagcccccccacagcaccgcgctttccttttgtctgagactgtggctgagctcagggctgtgaaggtcccagcgagggtcccagcccagctgccaccccaagagcaaccctgagcctcccccgcccacccgccaggactcactgctgaggccgggcacagcgctgggggccaggcccctgagcttcttgagggtgttcacggccacattcaggtagatgttcttgctggggctgcggtcataggccaccttctcctcgttcagtgcctgggggacaggcggtgcccagctgaggccatgcctgcctggtgccggggagccccagcggtggggtcgccatggggtcggggacttgcatctctcccaggcagctccgggtcacagctgcggctgagaggccgggggatgtctggggaccaccctggacccctagtccccacccgaccggccagataggaactccaggacctcaccttctctatggcctcctggttggaggtacagaacttgagacactcctcgatgaacaggttgagatagcgctggcggatgacggtggggactttgcccccaaactctttggggataatgggtttctttaaactctagagggaaggcaaaagctgccatgggtgagggcctccacaaggcctccagcggggaacgcagacgcgatgaggccgtgcccatggctggaggcaagagtgaggtgcgctgggacagatcagcctggctgcagtagggacagacacgccaaggcaagacaggagcagcaggggaaactgagggcagcggaactaaggtcatgggaaactgaggccatgggggcacaagggaacttgctgtactttctgctcaattttcctagaaacctaaagttgctcaaaaaacataaagtctattaattaaaaacaaaacaaggccaagcgtggtggctcacgcctataatcccagcactttgggaggctgaggcaggaggatcacttgaggacaagagttcaagatcagcctggacaacgtggcaaaaccctgtctctacaaaataaaaaacaaaattattagctggggtgtgatgacaccggcttgtggtcccagctactcaggaggctgaggtggaaggatcacttgagcccaggaggtcgaggttgcagtgagccatgattgcgcccctgcactctagcctgggcaacagagaccctgtctctaaacaaaaaaaaaaaacaccaaccaaccaa[162 bp omitted]atacaaaaacagccaggcgtggtggcgggcgcctgtagtcccagctactcaggaggctgaggcc[137 bp omitted]gctgtactgcggtgtggagcacgaaggcccgcagggcaggggcgaggctggccctccgcaggtcccatgtggccgggcctcagggcgtggtcttgggggtggtggtcctggccgagatgggaggggctacctgtaaggatggactgtgggcgattcgcttagggatgatggtggtggtagtcttggacgccatccccgacaatgtgcgtgttttcagctgctggccacctggctcagggccgttggaggactggctgccgctggccgcaagggtcctcttggcacctgtgggggctggcggggcacagggggtgtgggcacagggcgagtggctgcccatcaccacgtggcggagcaccaggcagccgcggccgctcagcgccagcagcacgtgcatctccgcgtgcagggggccgggccagggtgaggggctggggctgcgcaatggcatcaggctctagctgccttcaggcaagtccatcgaggcagaggacacaggtcaggctgcggaggccgctgaggacacgtcaccggtggggtggtccaggcctctgccacgtgttctgaccccaagcccaaggcgtcgatgtctgagggaaaggccctggctcccggacagaggaccgaagggtctcgggtgcccccacctgctcattggctttgccctgccctgcggcctctgtgttctgccttgccctttgatgaagtcacaaaccagagggaggaggccaggcctgcaggggctgcttcggagggctggccacgcgggcagctgcaacctgggcatgtacgtctgtgtggcaggggggcttctggactgggggctcggcaccgacccaggaaggggagctgtgagcagggacatctggccctagtctcagagcaacatccctcgaaatgccatctggccctggaaggtgcaagggaggcaggatgagtctgctcatgctaccgcgggccgcccagcaaggaagcaggctgcccgccaggctggcacgcgcctcttgcagtggagggtttgctcttcaggaacggacagagaacctccagactccctcggctgcacgctgggggcgagcccaggcagccacaggagtcctccaagccagatgagcccgccctgcggcactgccagcacttgggacgccagactcccttcaggcggcgggccccaagggcactgcgacagctcagcacccaccacagatcagcaacaggacaacccgagcgcggagacacagacgggaagcgtgtggggtcctgggataggcccaactcaatgatttcccctccctggggctaaggtctcagccgtgagggggctctggggaggggaggtcagagtagcctggagagctctccctaaggagggccgtgggatccatgggatctgcaggggaatcgccggggctggccctaaggctctccagccagcgccagggaggcaggggctccaaaccagcaggctgctcagggtggtcctcggacagcagccatgccctcccagggagcttgccagacacacagacctttcccagcctccagaccagaacctgcattttttaggagctttctgggggaccctcatctgtgacctgcctccagggatactttctcgctctacagacaccactgatgtgaagacgcaggagacaggacaaccccccgtgaagggtcctgtccacccaccactgaggcctggcccgactttctacaagaccctgctgggggggaagtgcccctcggagtaaaggaaatacagccccactcctgggaagacagcactcatttccatcagaggccacgccccccactcacacgccaggagaaagccacacctgcagaagcctgctccccacccaatgccaggtaccccgacatggctccccattccctggaaccacaggctcaggccctggttcagcccagtccccagcaggctgttggactcctagtaaccccggagctgggtcagggaaggaaggtgctgggccaggcctcctgcacccctcaacagtccccatttcacagacaggcaggctgagggccccagggagggggcccaaagtcatcccatgagcaagcaccatgtggttcaggtgagctcagagacctcagggtgccacctctcctgcccacatgcccacggccccccggcacaggccccctgggccaggactcacctgcagccaggcgggggttggggatgtgggcgatcctcctcttctcgccaggggcggaaatgtggacggagggcgacttctctgccagcctggcgggggcctgcagcaagctcgccgatgccctctgcgcctgctgggcccgcaggtagcacacctcctgcgccgtcgggggccgggccgggggcaccgcgggacccctcctcgggggctccacctgcgtcaccacaaatgctaaggcctggcagcacagcgggggcacctggagcaggcgaccccgggcaggcttgggagagggtggctggagctcgggggccggaggcaccacctccctggctgccttctgagctgctgggcacactggggggaagcagcagggggcagtggtcctcaatgccatgtggctccaggctcccccactcccagtgtctcccggtgcccaggctatgtcctcagccctgataaggcacgggtgggcgggactaccccgattacactggcactccaatccaatcccactacgcctaatcttcctcaaagcccctcctctggggaggctctgggactggagcaactgggactctcctggctgctgaccccggagccaggctctctgcttgtcctgcactacctcgccacgtctgcacaggggcctgacaagcgctactgtctccgggctacagaggacactggagctcagagctggacaaccggcccaggcccaggccgcacacggcgcagcaggccgtctgccgcactctgggggaggtcaccctggggctgctgacctgctctgtccctcgccccagcaccgtggcaatctaacaggaaggggcagggccagctccctctggaactcgggcagcgtcaaagataaggtgtcttcaaaaagctcatggaaaacgtgcgttgtgacgaaacttgcatggctttcaagtttttttgccccaaaataaactgatactaacttgtcataacatgtctgaaccagacggagtttgaggcactaaaaaaaagtaagacatcagttagaacagagccccagtcagagcaacaggagttctgctaaaattgaagcaaatgttaagcatcaaatttatggtaaaacttgggtggaagaacgaatggggaaatcactgatgctttacaaaaagcgtcacagatttacaggaacaatgtcccaaagaaatcagaagtttatgaatggataactcattttatgtatttatctttttgagacagagtcttgccttgtcgcccaggctggagcgcaatggcacgatcttggctcattgaatcctccacctcccgggttcaagcaattctcctgcctcagcctcccgagtagctgggattacaggtgcgtgccaccgcgcccagctaatattttgtatctttagtagagacggggtttcaccatgttggccaggctggtctcgaactcctgacctcgtgatctgcccacctctgggcgcagtgcctcatgcttgtaatcccagcattttgggaggccgaggtaggcagatcacgagaccagtctggccaacatggtgaaaccccgtctctactaaagatacaaaaattagcctggtgtggtggtgggcacctgtaatcccaggtactcgggaggctgaagcaggaaaatcacttaagcccgggaggcggaagttgcagtgagcagagatcgtgccactgcactccagcctgggtaacagagcgagactccgtctcaaaaaaaaaaaaaaaaaaaaaaacaaccaaaaaacaaacaaacagaaaacagagggatgaagctgggagcagtggctcacgcctgtaatcccaacgctgggaagccgaggcaggaggatcacttgaggtcaggagttggaagaccagcctgggtgacaaagcaagaccccctttttttataattttttttttttgagacagagtcttgctctatcacccaggctggagtgcagtggtgcaatcttggctcactgtaacctctgcctcctgagttcaagcgattctcctgcctcagcctctctagtagctggtattacaggcacccatcaccatgcccagctaatttttgtatttttagtacagatggggttttgccat[138 bp omitted]ggcctggcctctgcggaccttacctcctggccttgcttggaaaggtgggagatcctcctcttctgcccggggaacagagtggtcagacccgaaagccccttctcctcactcttctcttccttggggggctaagacacatgtccgtccgtcagcacaggtctgccctcgctgccaacaccaacacaccccaacctcaaactgcccccggcaagtggggaatggaacagtccagcccccaggcacagcagctgagggctcagggccaacagtccctgggctttgtgtgggtgcagtcggaggggtgggcaggtgtcacacgttctgcagatgcccaaggctacctctcctgggcacccagggccccagcttggagaccccagggctgcagaatgaaagcacactgggaaagcgaggccaccttgggccgaaccagctgctgcgggctgagcacttgggctcagtctgtgtggagtgagctccccctggtggccaatttggggacacggggccaggagacccaggggtccagggctggcccaggagagcaagagctcgccacgctgggagtagggaggagggaggggaggagaaaggagccggaggggatgaggaggaggcaaggagaggagacagaggagctggaagagaagagacagagatgggggaagggaggaggggagaagagagggggaagggaggaaaggggaggcgaggggagaggggctagaagggtgtgccggaggtggattcccctgaggtgggtgggtgggccaatatccccctgccagtcagtgggaacagaccgtgtgcacgtggccacagaagcctggctggtggccacgggccagtgacctctgggtgggtgaggggcaacaggagcaacagggctgcccgggtgctcctgagctcctgagatttcaacgggctcagggaccagcactgaggagctgcctccaccccgtgcctccgagccaactggaaaccactccagatagaaggtctctcaccaggccctcggctctgcctctgcccgagcccagccccagcacccgcgcgcctcacctgccgggccagccggcctctgtcctccgtcttgacgctggtggactcgttgaagatccgcaggcactcctccatggggtcggagtcaaagtccacctccttctccagggccgagtagtccacatccgcccccgcgctggaggtggaggaggaggaggaggaggaggaggatggggcgggggaggggggcggggaggccttgagccgcttgggcggcccctgcgcctccgggaagcccaggctggagtctgagtcggagtctgagtccgagctgaggctggggagggcagagggccacacgctcggcacccctggccctgcggcctcgtcctcactctcgtccccaaagaggtcggcgtggctcagggcccgcttcttcagcttgggggcgtcctgggaggcgccctcgtctagtgagcgggctttccgctccactagcttccccgacggggccttggtgctcttcctgtcgggcagctggagggggcggggtgggcctctgccggccgccggtcgggagtccccgcttgtggggctcggccgccgcgctggccggtcaggcctccctttccctgaggtggccacaggagtggccgaagatggcttcttcttggtcccttccggccgctctgccttgcgccgggggctgctggcctgcgggcccttcttgtccgcacggggcttctccacaggccgccctcggcccttgtccttggtcttgtccttcccctgggccccgtctttgcagctgggggcaggtggggccccggtttttttcttcttgggttttccctccttggggcagcccccatcctgtgaggactggacctgggctggggaggcgggcttggctgggggcggctggaggtcccccacgtcgcactgcacggccgtctccttggtctcccgcaggccgcccccctcggcctccaggccctctttggagggtggctgcccggtggccttgatctcagggtcggccctggctttgggggtgctggccgtggtgggctcgttacctgggaccgtggcggcctcatcttctgagtctgagaaccttgcatcgcaactgccaaaggggtcacagagcttcttgggagcaggtgtgtagggctcactgccgcgggagccccggggccgcttggcggcccgctcatcccgggagctggccctgctgaggtgccgggccgagtagttggagagagggtcatactccaggtctgtgggtggcctggagttgtccaccacgtacttgccactgggaacggggcggctgtgccgccggggctggctcacagccttggggacgtattccagggcaccgccaccccctccacctctgccctgacccctgtccagggacgccagcgagtacttgctgcccggctcggcaggggcggccagtggggtgggctggtagccggcatcagggcttaataggccgtggctgccggggctgtagtcgaaggccagtgggaaggcatcctcgtccgggcccacagtggggctggcgttggggccgcggggcgccagggcgggggcctcggcggagcggtgctcacgggtcgtctccagcagctcccggtagcgccgctgctccagctccacctcactgcgcacggcctcgatggcctggttgaccagctccaactccagcacatccgggcgcggctcctcccccaggcccagggtgccattctccctctgcgcggggggcttgggcagctcagggttgtaggggtcgtaacccagccctgaagggaacagagagcacagctgtgaccagcctgccggagaggagcccgcagcatgggggcggccccggtctcaaactgcagggaagggaagagacctgcctccgaaacccaccacgcactggcgcccgccaaggctctggggtgcccagctgggtacaggccatggcgccatctcaggccctgtgccgggccccgccttgccctgaccaatgggcgctggatgggcctgggctgcgtgacacacagctccctgggtactggaggctccctcacacggctcatgaaatgcgcacaatgaccatggtggggtggacactcgacaggctggaactccccggggcaggcgggtgtggagctcccagcattcagggtgccgggctgaggcaggactgggctgggccgacaaccacagcctgacggtggacacaggagagcccttcctcagccaacacggccccacccagccagcagtgtgcccgcggtgtggcggaggtgtgccagcagtgtgccagcggtggtgtggtggcggtgtgcctgcggtgatgtggctgagcagggccgggggatggggacatgcccagttgatgggccaccctgcaaaatccacaggaagattttttttttttgagacagtctctctgctgcccaagctggagtatagtggtgcgatcttggctcaccgcagcctctatctcccgagttcaagcaaacctcctgcctcagccccccaagtagctgggattacaggcgtgcgccatcacacccagctaatttttgtatttttagtagagatggggtttcaccatgttggccagtctcgaactcctgacctcaagtgatccactgcacctggcctactttaaattaattttttaatttcaaaactttttgtagctgggcgcggtggcgcacgcctgtaatcccaacattttgggaggccaaggcgggcggatcacctgaggtcgggagttcaagaccagccagaccgacatggagaaaccccgtctctactaaaaatacaaaattagccgggcgtggtggcgcatgcctgtaatcccagctactcaggaggctgaggcaggagaatcgcttgaacctgggaggcagaggtttcggtgagccgagatcacaccattgcactccagcctgcgcgacaagagtgaaaccccgtctcaacaaaaaaaaatttgtagaggtggagtctcaccatattggccaggctggctttgaactcgtagactcaagcaatcctcccacctcagcctccaagatagctgggactatagcccaagctgctgtgcctggcttaaagcacacggctgaaatgtcttcccggggggcagctgggaacatgagactcgcatgttatttacgtggttccagaacatagtgtagcagaccctcacaacctcaatgccaccaacgtcagcacagaagtcagaaccacagaagcctcccgtggggacaggccgaaggagtctaaagaaaacatgagcaagtggagcccagtattccagcgaagcaataaaaaccaagttcaaatatttactccagaaacttggaagttgaccattagaaattctactgagcacggccaggcacagtggctcacgccgatcatctcagcactttgggaggctgaggcgggaggatactgcttgagctcaggagtttaagaccagcctggatgacacagatcccatctcttaaaaaaatacttaaaaataagctgagcatggtgatgcacacctgtgctcctagctatgtgggaggctaaagtgggagaatcacttgagcccaggggcttgaggctgcagcgagccaggattgtgcctctgcactctggcctggacaacaaaacaagaccccagctcttaaaaaaataaaataaagttccactgaatgtaattccgtaacatctctaaaggtctctaaaggtcaacaggtctgatcctctggagttggcaggaaatggcgccaaagacgtctgcgtcctaattcctggaacctgtagatggtatatccccttagatggcaaatggggctctagatggggtgaaatctcccttgcccgtcactgagggggccatggacaggccgagatcttgcagagcagtttcgcaaccatcccatgcagcttcaacaccaccaccttcagactcggaatcctcagaacccgtgccacagacagaccgcacagggcaggtacagatgcgtctggtgcagccttcactgcaaaaacacaacaataaataacgcaggagatgacctagaagccgaaacgcaggtcacctgtggttaagggggaggcgtgcgccctggagggacctccaagtcacactgctatggggaagaagaggggcaaggaatgttgcacactctcacctttgaaaagcagctccacaaacccagtgagatcagattccaacaaaggcgcacgggcccacaccaagcccgcagtcccatggggtacagcaaatgcaatctggccttcatttatgctgcacccaacaccaactgcccaagagggacgtgaatgctgacacacatccccgacaggctgataaggagctgtgacaccatgtagcaaaaggcaacagccccatgggaacctgcccgcaccaagacgccacttggctctgacttgattctgactgaacgtgcagcttgtctgaaggtcgggcctcaggtgtgtttcttccactcagaaaacctgcctgcccttcggcccacctggagatcgacccccacagcgtgctaagacttccgtgcagagaaatggctggacgcagccaaggggaggcaggcacaagacctcccactgtgggcgacgcagagaacagcaacagaactggaggcttcccctatggcccccacccacaccccctcaagccccagcaggcataagaaagaaatggctggtttcggccggttgtggtggctcacacctgtaatcccagcactttgggaggctgaggcgggcggatcacctgaggtcaggagttcgagaccagcctgaccaacaaggaaaaaccccatctctactaaaaatacaaaaaaattacccagccgtggtgacccatgcctgtaatcccagctactcgggaggctgaggcaagagaatcgcttgaacctgggaggcggaagttgcagtgagccaagattgagccattgcactctatcctgggcaacaagagcaaaactccatctcaaaaaaaaaaaaaaaaaaaaaagaaagaaaaagaaaaagaaaaaaagaaatggctggtttcccaagctgctcccccgagacacacccaccagcagaacaaaagcctccccaggtaagtccccatcctaatccctgggacctgtggccaggccacctcactcagccaatagactgcaggtgcgacttgaacaaaggaccctgagggtgggtgaacatcttgcattatccgggaacccagtgtcctcacagggtcctttaaagagggaggcaggagggtgagagtcagagagactggaaaaggctgtgctgtgggtttgaaggggaggaaggcgccctgagccgagggatgcaggtgcctccagatgctgggaaaggcgggcactgactctccccggaagccttcgggaggcccagtcctgcccacagcttgacttgagcccagcgaggctgactttggacttcccagcccagcgctgagagagagtgtgctgctttaaggcccacggggacgaatgcagcctcaccgggtgatgaaagtgcagtggaaaacagctgcccgctgcctgtacctgcgaaggcggaaggcccctcctgttcccgggaaccctgcagggacagcgggaggccgggacccggaggctgcagaggaggtgggaggaggcctggtcacgggcagctgccgcctttcccttgaaatcacagcagtgttgtgcccatctttaaaattacatttagggaccaggcacggtggctcacgcctgtcatcccagcacggtggctcacgcctgtcatcccaggcacggtggctcacgcctgtcatcccagcactttgggagaccaaggcgggcagatcaccagctcaggagttcaagaccatcctggccaacatggtgaaaccccatctctactaaaaatacaaaattagccaggcatgggggcgtgcacctgtaatcccagctactgaggaggctgaggcaggagaatcgcttgaacccaggaggcagagg[187 bp omitted]ggcgagaccccgtctctacaaaaaaatacaaaaaatgagctgggtgtgatggttgcatgcctgtggtcccagctacttggaaggctgaggtgggaggatctcttgagcctaagaggtcaaggcttcaatgagctgtgatcacaccaccgcattccagcctgggcaacagagcaagatcctgtctctaaaacaaataaaattaagtagcatttagacaagaggaaggatccgtgtgtctgttttggaccactcggaactccgcgggactgtgtggagggccacgaggtacgggcaggcaggggaacatcacacagaagccacaggttcttctttgcctgtgccaggctacagccaaggcatttccaggaaacgtcaccccatgtgcccagcaggcgcagaggggcccattctggcaccatctcacagccaaggaccctgggagtcagcgagggcacccaactaggatcagcaactgtggctgccagttcctctgtgcggggagggacagctgccaggccaggaggatgctcccggcagggaaacggccggctggggctgggtgtcagcccccacccagggggagggctgcggaggccagcagcagctcaagggcgccctcccggcccacttcactgggggaggctccggctcctccctgacccagccggctgcagagcacgccaccctgccacccgcctggtgaacagggcaactagtgccagccctcccccagccccggaagcccggctgcccagtgacgtggaggggccaggccaaggccactgtggcgtgagctgcagagattcatgaaggggaggtgacagagcacaattactgaggaggagcaaggccaggtcagggagacactggtctcccctcccaaggctccagctaacggggatgcagagaggaggaagagcccgcctaacgggaaggctctcctccccaggcaggggtgggcagcagtgagactgggccccaggagggcaggcgggggtggaggggactgaggcatctctaaggggctaaggataagggactccactcaggggcttccacctccttgtcctggaccccagggctctaagacacagcctgcaagatcaacccagcccaggggagccaagagtcacaggcaatacacacaccagccagcagacacccgcgagcccttcccaaaggaaggaaattcagacctctggacattgtggactctgaaaggagagaccatttccccaaaaggtgcttttggaaggtcttggaaggaatagcacctgcctcccaggagtggagccaggcccccaagcagagcgcaggacaggtgataagggtccaatctgggggacgtgggcttgtctttctaactggaagcctgtgtgagtacttgttttgttgttttgtggagacaggcattgcccaggctggagtgcagtggtaccatgatggctcgctgaagctttgcctccccggctccagcgatcctcccgcctcagcctcgcaagtagctgggaccacctgcgtgcaccaccacatccagctaattcttttctttttttggtagagacgggggtctcgctgtaattgcccaggctggtctcaaacttctaagctcaagcggtcttctcgcctcggcctcccaaagcactgcttgtcttttaagggctgtgaaacctgccccagcctttagccaacagatgggaaagagcaggggcacctggaggccggagggcacactctgcagagggggtttcagcattttcactcccgggtggaggctgctaccacctccacaaagactgcaccaaaaagaaagcaggcatgctaggcgggtccgagaagactgagatcaggatctgcaccacggcctctcctccctgtggtcactgggctcccccaccctgcagcctgtgacccactggtgctggaaggcagcatcctggcctgggcgctccagccaggtctggaagtttcacacaggaagttgcctggggctcggccatggctgcctgcagctcagaacagggggtacggcgtgctgagcccctgaaaggtcacctgaagctggtacacaccactgcctccctggacctccctgtcccaccatgcctcagagggttggatctgggtacctgtcaggactggaaaggccccagggtggcatgtgcatgctgctaggtgccctgggagcccacccagggggtcacatctaaaggccgagtttgggccaggcgtggtggctcacacttgtaatgctagcactttgggaggcggaggcgggaggatcaccgaggtcaggagttcgaaaccagcctggccaacatggtgaaactccacctctactaaaaaatacaaaaaaaaattagccaggcctggtggcaggcgcctgtaatcccagctagtcgggaagctgaggcaggagaatcacctaaacctgggaagtggaggttgcagtgagccgagaacgcaccactgcactccaacctgggcgacagagctatacatgcatacacacatacatacatacatacacacacacatacataaatgaatgccgactctggaagtaggaggggcccgtccaggccccgtcccacggctgggaattactttggataggagcaggtgggctccttcctggatgtggcccaggtcagtctgtttctgggaaacatggtgaattggctgacaggaaaagcctacctccagaggcctgggagctgccccttcctccctgcttcaccccaaggccaggactgggaggtaccacccagccccagtggtcctgagaggccacaacgcctggctggctatcttccccagcctctccagccagggctcagcccagggcaacgcagcccagccttgtcccggcctaggagagagcccactccctacaccacccatcctgaccgcatctcctgagaccagtgccctgcagccccgggacgggctggatgacaaagatgatatttcttcccagggttctaggtgtggggcctgggaccagcactatctgcccaaggccatctcctggcccccaaaccttcccttggcccagaaacccctcaccctgggcatccactctcctctctgctcccactgcccccgccccaccacactcaatccacccacacagctgtcctgtccccagcaatggggagaacctggcatgagctccaaccccacacggagactgaaaggcagcaaaaatgacaagatcatggagcacgaagatcccaacctgaacttccagaacgttctctagtgagacccgtccaaactcctgtcttctctcagtcagcccatttcaaagatgaggacacccagtgccagcgagagccggcagctcctagccccacaaggagccccaggcccctcccacccagacggggagactcagtggctctaaagaacccggcaggctggctggacacgatggctcatgcctgtaatcccagcactgtaggaggccgagacgggtggatcacctgaggtcaggagttcgagaccagcctggacaataaggtaaaaccccgtctctactaagaaaacacaaattagccgggcgtggcggcaggcgcctatagtcccagctacttgggaggctgagacaggagaatcacttgaacccgggaggcggagactgc[131 bp omitted]gggctctcaacgcaaccaggcatcagcaggactggcccctccagcccaggcagtgggccccgcatgctggcccagaacaggccaggcagagaccccagatggaaacagacagtccctcccgcctggggcttagctggacaaaaaagataagcctgacactgcggcatgagataagcaagactacccccaacctagcccctgggggagccatctgggcggcctgaggctttgaaggtggagacagaagaggacattcccaaaacagccacagcggcagagaaggcacggggctgaccctcgcgaagcgcaaggcaggggctggttgtgtccacgggagcgcccatcccataacagaccctctgggaagaggggtctggaggacagcacccctgaagtccacctcctgcggacggcagagtaaccataaggtccccacaaatggccatacgtccactctgggggtccctgctcctggggcctcccctccaaccctcacagtgggacgtcctccagccccatccttggacatgcgggcgcccggggccctccatgcacagcccactggacagataggaacccgctgctcagaggcaaagggaccagcactctgcacccagaggaggtcccacagctcctagaccacacggggcagaaacagggtcacctggagagggcttcgaggaaaagtccagccagtgccgggggcctggacctccaccacccagcagcttccaataccctctctgaaatccaaggtggcccagctctgccccaccccccacaccagactccacccaggtctcagagcttgctgtggaggctgggctgtgcctgcagcagcggcacctggggtctaccccactgcccccagggttctcctcgacccccagggctgcgatccgagcctcccctctgctccaaggcaccgccctccccacctcgacagcgcagtgtgcagtgccaggaccgcccagcaggtggagccacacggcagggtccaggggagaaaaagaaaaaggtcccggcctgaccggggaccaccagctctgctctctggggcgtcctgggcatttattcacctcatggggcggccgtccccacatgccatgactggacgcgctgctgtcccaaggcttacagctcgaggctaggggacagggacggtaaccaggacagaggtcactgcctttcaaaacaatgtagaaacaggctgggcgcagtagctcacggctctaatccccgcgctctgggaggctgagcccaaggccgaggcaggtggatgatttgaggtgaggagtttgagaccagcctggccaacatggggaaaccccgtccctactaaaactacaaaaaattagccgggtgtgggggtgcctataaccccagctactcaggaggctgaggcaggagaattgcttgaacccggaaggtggagtctgcagtgagctgagatggcgccaccgcactccagcctgggcaacaagaacgaaactccatctcaaaaaaaaaaaaaaaaaccagctgggcgtggtggctcacacctgtaatcccagcactttggaaagtcgaagcgggcggatcacctgaggttgggagttcgagaccagcctgagcaacatgcagaaatcctgtctctacttaaaaaaatacaaaattagccagctgtggtggcacatgcctgtaatcccaggtaatcccatgcctgggcgcagtagctcacgcctgtaatcccagctactcgggaggctgaggcaggagaatcgtttgaactcgggaggcggacgttgcggtgagccgagatcgtgacattgctctccagcctgggtgacagggcgagactccttttcaaaaaaaaaaaaaaactgaaacagaagggtacaaatggcaaaggacaagaaccggcagggaggagccagcgggaccttctccccctatgcctctccatccctgccaagagcccaccttggctgtgagccactttcatggtccacacagagtaagttaagagtccagctctcagccgggcacggtagctcacgcctgtaaccccagcacttgggaggacaaggctggtggatctcttgagcccaggagttcgagaccagcctgggcaacatggtgaaaccctgtgtctactaaaaatacaaaaatcagcagctgggcacggtggctcacgcctataatcccagcacttcggaaagctgaggcgggcggactgccttgagctcaggagtttgagaccagcctgggcaacacggtgaaactctgtctctactaaaatacaaaaaattagctgggcgtggcggcgtgctcctgtaatcccagctactcgggaggctgaggcaaaagtatcacttgaacccagcagcggaagttgcagtgagccaagatcacgccactgcactccagccagggcgacagagcgagactctatctccaaaaaaaaaaaaaaagagtccagctctcagctcctcctcatcccagggccttttctgtccccaaaggacatttcccagtgggtgtttctgggactcctgtgctccccgtcaggcacagaggactaaaagcatccaggagccctgcagcctcttccaggggctcacagagaagctggagtgggcacctccacggggcgctgcccctcagccaggggttcacaggctgttcctaggatgggtgccgtggcgcctaaggaggaacccacacaccagggtgactgcaagcacaagctgtttttgttacttggtgacctgtgtgcagatgctggggggacggggtgctggctggcaatgtgggccgaccccggccccatcattcattcctccagcacatgttctctgaatacctgcccaggacctcagagagggcacgcagcctgcagggcacaaagggcagggccctccctctctgtctcatccacttccccaaagtccacttcctccaggcagccctccgaagtcctccctgcagaagcagcagtgcctggcatagtgcctgggatacagaggtggaaggcatggtggagccctcacctcactccacctcctcggccgtggtgcacggggcggtggccaactcaggactgcgcaggcccacttccatggcttccagatcctgtctccctagggcctgctcctgaggcagtgctggctcccttttggtctctgagggcctctgagccactgtgagaggaggagggaggggtctcagaaaaatggactgtgacccgtgaccgttaacagggtggggatggacctgtcgccaggacaaatggacaggctgggaagccacagggcggggatacgcctggagtgcacgccaggcccacacccccaagcacacgctctctgccaccttcctggccctgccccctgccaggctcttctgagcaccccagcgtcgacggagctggcccagggcaggtgtctgcagagatctgaggaaggaaggaaagtgggaaggggaaggaaacactgacccagaggcacgggcccctccacacctgcagcacaccgactctccagacatgagtctctgtgggaacaggaagagactccagaaagctgagaatcgcagactgcccaaccgcaggagcgctcccaggctggggacagatgagacagcatatcaacagtgagccccatcggcggcaagctcccaagcagccccaagcccagagcaggagaacatcccaggctttcctcgagctgtctccatccccagagcccacagccctaatcccacttccagccacaggcaaactcctattcatcctccaaaacccagcccagtaatcctgtgtttggaaacactcgccccacccccctgcaactctgagtgacacccgggcccgccccacgtcacccctccactccctgcaactccaagtgacagctgccctgtctcctggacccgggcccaccccacatcaccccctccgcttctgcttcccgagtcccctcagcctggcgccacagacactgagtctagatggacccagacagggccttggagggcaccaggaccagctcctggctttacagagaacactgaagtcctgtggtgtgtgtgtccaggctcagcccacagctcgtcccgagtcctcccccaaccactcctttcctgaggccggaagcaggggcaggtcccagaaccccgggctccaggcacgcagcctgtcatgggacgggaggcgctccgtcctcgcagccgttcccaaaaacctctcggagcctaagggagggatcgccccgaaacagccagtgcacatgcggctcctccaagggtcccagaggacttggctgttagaggaggaagaggaatggcaactcgagaggtccccgtgaggctcagggacccccaggattgccctgacagtctcccttctaccctgtttattttcttttcaggtttttgctttttgttctgcagcagatcataccaacagaatctacccactgcgcggacagcgtaaggaacaagccacggccgggcgcacccagcgctccccggaaacctgcctgctcctctctagggattgctttgcagaagggattctgagggtggggaggagggcggaggaggacagagttttctcgtcaaagtgaggcctgctacagcacagcccgcacgacgcttcccgtcacactcagatgccacgaccccatcgtgcagaagagctcgcagaggccgagggaggttcaggaggcaacaggctcaagggggtaacgcccagcaggaggaggccggggccttcctagcgagctctgccccacagaaagccaagcaagacgccttcattccggggtacggtctccagagggacagaggccggccactggcacctgaacctccagtctgcagtccctggaggagacggtaaagctgcacagggctctggggggagcgctctggggagcggctcaggcactgcaagagtccccggaacccctcccagcaggcacgcttgtccccgctgaccccagccccagcgagctgctctgcctctcccatctcaggctctgggggcagggacggtgcttctcagggtctctgcctctccctacaggcagagcgccagctcagccatccctctcgaaaacacaaaaacaggcccagcacagtggctcacgcttgtaatcccagcactttgggaggctgaggcgggtggatcacttgaggccaggagttcgagaccagcctggccaacatggtgaaaccccatctctactaaaaatacaaaaattagccaggcgtggtagcaggtgcctgtaatcccagctacctgggacactgaggcagaagaatcacttgaatccaggaggcggaggttacaggaagctaagatggagccactgcactccaacagcctagacgacagagccagattccgttgcaaaaaaaaaaaaaaaaagcagcagcagcaaagaaaacacaaaaacagcaggcggggccgccagaccggcatcctcatcctcaggactactgccccaagctagatctctgtctgtggggttgtccccagcactgaagggtgctgagcagtgcccctggcctctgccctctctgtgcctgcacccccaaactggcaaccaaaacatctccagacatctcctaacattcccaaggtgcagaaccgccctgtcgggatcagtcactgctctactgaagacctaagcaaagaatcctaaaatatgaataccaaaaccagcctcgactggcacggcccacgcctggaggcagctccgggcccagcagccaggttttcaaagctgcccaggcgctccggaagtcaggtgaggacctcagaaccttgggaaaagcccccccaaaaaaacagaatccaacctcatctgtgaggcagggtcccagccatggctcaagcacagcaagcccgggacctctggtgtggagtctggaggaggcccggcaagcggcctggtgccggactcggcaaaggaagccacacttctcctctggctcttccgtattctctgatgtttctaaaacaaacatttccccaggccagaaaatagtaccttcaaaagtaaagcacccagagacccgtggcaacacggacaggcccccaggccctgggaacccagcgcttttcccatcgccatccacctgggggagagctgccagcacaatcctgccagcatctgcaagaaggcggctgctctggaaaccccaggcccctttcctctaaccccctccacacaggaacatcaagagtcacggggcagcagagccacccactctgtggtaggagtgtgggggagggctcctcctcctcgaggccagggcaaagcttcaaccccccgcccggagggtcccagctccccgggcccagagccgcagctgggcgaagcttcaacccccagcccggagggtcccagctccccgggcccagagccgcagctgggcaaagcttcaaccccccgcccggagggtcccagctccccagggcccagagccacagctgggcaaagcttcaaccccccgcccggagggtcccagctccccagggcccagagccgcagctggactcgcaggctcgccggcgagggctgaaaaagaaacggcctcagcaccaccgctggttgtcaccactggggtcagggaagcccagggacgctgctcaacatcctacaacgcaaaggacagcccaccagacgacaatctggcccccagtgtccctagcaccaaccgtccctccagcaagctccatagctgccactccaggccaggcaggcaggcggccccggtggcccgattgcccacctgccacccgctggtaaaatcacccccgggtcctcatacgccctggtcaggcctggggaaccaaaagacaatactgctggctgcgggggttctcccctagagtccattccttcctggacgcggctcactgaggatgaaaagtcggaccgaggagagcacacactgtcacgtctctgaaggtgacacaggtggtcagacggtgccttcactgccccacggaaagccggctgtctcccatccaccaggaggaggcagcacaggacgcagccagcgggagctcctgaccctcctgagaggccagaggaaatgaaggcaagccatcctctgcagcgaggcgccattcttggcctccttctcccttctcgcctgactcggggcctcagagtttccgaggagagctggcaagccctaacagatcagtaggatcccagggctcacctgcctagcaggggtatgggaggctgtcaccgacaccggagagccaggcctgcttcaggcccatccttggaaggtttcaagttcccttctgtgcccagcccacagaggctggcagcaaaaacggcagaggaggcaggcagggccccggcccacccacatccaacccagcactgccagttaccagccacgcgtacacaggtgagcagcctcccggcgctgggcctcagtttcctcatctgtaaactgggaagagccactcccactgctgtttgggggtcacaggcagagtccgcccagtactgctgtggtagtggccaagtcaagaggtagggaccccagagcccatgtgaggggccacatctgaagagccagaaggaggaggacccctgcctgacccgactctgctagaaggctcaggagatactgggtacatggtggctgggcttcaggagatattgggtacacggtgggtgggcttcagtagatactgggtacacagtgggtgggcttcagggctccccatgtacctggggctgctccctgagcgcctctaccccaggactcctgccctctacagatgcagttctggagagtcgcctggagccccagctgggacgccgccaacagccccacccagaaccactggcaccgggctgccagatcctgaacccgactgcgggatccccgagggcaggagctgtgcgccccgcacacacgtctgccgctcactttgcagtataggatggccccttccccaggcctgggactgtcctgctggggcctgagtcagcctgtggcgcagcactagcatcccctcaacgtggtgccctcagcctctgcctccctcaggagaagcatcatctgggagcacgttcctgccggagctgtgaagccctgagctggggcccaccgcacctctggagagccctggactttcctgcaatcctccccggaagggttccctctcctggaagacagtgtcctgcctctcagtaggacacagactccctgagacaccacagggagtgcggggcagtgggcagaggcctgggttctgaggtcagatgggaggaaggtgggatctagccctgcccactccacatagacaaccgaggcccctcacctaccaccaggctgcagccaaggcccaggcagcagagagcggccactggggggatagtaacgctcattcccaactcacaaggctgggatagaacgtgcccctctaggccggggatgcacatccctgcgtcccagggctacacggtgcccgccgtaagggctgctggaccatccctccaagccaccctgggcaggtccagccggctctgaaatggctgtgcagcccagcgcggtgcttcacgcctgtcatcccagcacttcaggaggctgaggagagaggatcgcttgagtccaggagctcaagaccagcatgggcaacaaagtgagaccccgtctcggcaaaaattttaaacattagcgaggtgtgatgtcacatgcctgtggtctcagctagtcaggaggctgagccaggtggatcccttgagtccaggaggtcgaggctgcagtaagctgtgatcgcaccactgcactccagcctgggtgataaagtgagaccctgtctcaaaaattaattcattaaataaaatggctgagcaggtccagggataagagcccagaaggaaacctgagtccttcagcagtgctgctcaaggtcgccaatgacccgctgagcctgtgacccagggcccaggagcaccagccaccttcctgttcccgtcgcagctccgccaagcctcccaaccctgcctgccttggtgccctcatcagatgccctctccttctcccagaggccctggaggctccagccctgccctggccaggtggtagtatgggcaaaacacgttcctcgataagcctccgtttccccaccggcagcaaatagctcacagggtcaccatgcagcgcgtgtccagcacagagcatggccccacaggtgctccagggctagctgagggcttttcacctgaacctctgtccactctcaatcctgggaggccagcgttcctgtctatctcctctctggaggccgctgccctgtgcaccctaaaatccccttgagaagacatggcaaaggctagatcacgccagcctcttcaaatctcataggaaactgggtgtgtgtaaatctggaggtgtggacatgggacatgcatccccccctgtcctcagagggcagcctgatgaacatgtcacggaggcggaaacagagggtcagagaaacctcaccgcaaggaagatggatcctgccttctgcggggggaggcagtcttctaccagacagtaacaagaagccctaccaccccaccagagatgggaaaaggagttcattctcaccagcaaaagggaaatgcagacacgccatggtaagaggcaggcagctgcctttttcccataggaacggggggcagacaggaagacgacatcaccaaagggaccctcaaaaataagcctttgggaaacaaatgagccatttgggatgcagacagatatcataagcctgacttgcgccgggtgcagtagctcacacctgtaaccccagcactttgggaggccgaagcaggaggtcggctcgaggccaggagttttgagacaagcctggacaacatagcgagaccctatctccacgaaaacatacaaagttagccaggcttggtggcacccgccgcccatagtcccagctactcaggaggttcaggcaggaggatcccttgagcccaggaggtcgaggcctcaaagagctgtgatcgcaccactgcactccagcctggactatagagtgagaccctgtctctaaaaatagggttaaaatgagcatcgtgagtctggtgtcacagcctccgagaagcctctcccacgcgttgccttcttcaccaactcccagcccccgccaaagccggctgcgtgctcccaggacatcacgacctatgctacgggatctgtaggcacagctgtcggcaggtccctgagagcacagccggcatcgtacgcagctctgaatcccccgcctcaaacacagcgaagacgctgggctgtggggagctgacaagtgattgcttgcatctgtccacctgcaaacaaccgcccacaggtgcaggtgtcccaagcacacttatcagggaaatcagaaaaaaatgctaccttttctggcaaaacaggaaaataaacctattcttaaatcctagagaagatgtttctcttttgcaggaaaaggttctgagctgagactgtttcatggttaaagtaaaaacagtgcttgaaactcacgcccaatgaggaaatctgggacgaaggaagtcaggggctgggtgaagcagagagccactatcaagggacagaggtaacaggggagtctgaatgacatcacactcgataaccctccctccacgactttccttgcgatgtccctctttttctccaatccaaatcccacatctcctccaagaaacgctgccatgacgatgaaaaccaccatgacgctgtgaggtggagtccaccaacgtcctctgcccgaccaaaagcatggaattcctcggagcccactcgagtaagctttgacttcctccctgccagtcatgctggacacagggctcgacaaacacaagagacgatcctcggaccatcctaactcaacgactggagactgaggtggccgctgccagaggcgcggccggaggaaacgtcatggaaataaacaagggcggccacaagcacatggggtccgggaagcggcgggcgccaatcaggggcaggaggagtccaggacctgcctagcgccggccgcgcccgtctcccgagcccccttgtgtcaggcccggtgcccggtactcaacatgcgctcgcactccgccctctagacagccctggcaggacgcgtcctcctagttgacatttcacactcgtgaagacgaaggcttagggacatctagtgctttgcaccgggtcccagggtgggtggttccggtcccgactgggaaaaccgtcgcccgcgaacgtgtggggaggaggctgggccgagaacggggaccccgggcgggaccggggtggggtccagacccgggcaggggagccgagcccaaggcaagcaggcgggcgggcattacctgctgcggggggcgcctctccgccgtcaccgggcgcgccggagccccgggccccgcggtgccggaagtggcagtagggccgccggcagggccccccgggcgccccagaccaataggggcagtcaatggcccggaagaagccagtggagcgtagcatggtccgtcccgcggcggggccccggcccggagccgcccgggccccagggccccctcactggcgccgcggtcgccgccgcccgcgcctcacggaccccgccgccgccatcttgctccgaggcccccggaggccctcgggacgccgccgcaagggaccccgggaggggctgcccgcagcgcgcctgctcagaaacgcctgctcctgcgcgaccaaggctggtgacggacccctgggccgggacagacggccgcgggaggaagtaaggagggcaggggctgccctgcctgcggtctccgggagcctcgccagcgccgccgcccgaccttcggcggctgtagcggcgccatcttgagccccaggcccctgcggcgccagggctgtccacggcgcgcctgaccaaaaaagccccgcggggcccgctattactcatttgcatattatttcctttcgttagcatatcaccttaaggcgccctctgctggacgaggagagttctgcggggaggtggccttaaacctgggccaggtgaaactcatggttgaattactccgttcacagtctttaaaaatcccctcgccctggtatacagctggctctcaagaaacgccttaatctccccaacctcgactcttgtcatcagtctaatgaccaggtccacgttcactcatttgttcaacaaatattgagcgcctactgtataccagctagagggtgcattttaacagacaaacgaggaacaaggctgggatggggcaactctgtagtctggtggagtaggcccacgtcttaatgggaagtttaacctggtgcattttggtgggattgtaaaatagtgccactgctatgtaaaacaaaaaacccaaaaagtttgtttttaagagacagggtcttgctctgtcacccaggctggagagcagtggtgcgatcacggctcactgcagcctcgacttccctggctcaggtgattctcccacctcagcctcccgagtagctaaaaccacaggtgtgcaccatcatgcctggctaattttttgtattttgtgtagagatggaaaaagttaaacagaattaccctatgagcaactctattcctgggtatacacccaaaaagaatagaaagcaaagtcttaggtcgggcacagtggctcatgtctgtaatcccaacactctgggaggctgaggcgggtggatcacttgagcccaggatttcaagaccagcttggccaatatggcaaaaccctgtcctactaaaaatacaaaaattagctgggcgcgatggctcacgcctgtaatcccagctctttgggaggccgaggagggaagatcaaccgaggtcaggagtttgagaccagcctggccaagatggcgaaaccccacctctattaaaaatacaaaaattagctgggcgtggtggcgggcgcctgtagtcccaactacttgggaggctgaagcaggagaatcacttgaacctgggaagcggaggttgcagtgagccaagattgcaccactgcactccagcctgggtgacagagtgacagtccgtctcaaataacaatacaatggttaagatgacaaattttatgttatgtgcatgtgattttaccacaattataaataaatgacaggatgcaatgatgaggggacgtgggttgggatgggtcatgggcgactctgcagaggacctgatctaatctcaaagctgtcctatcatgggcagtggaggcgtagactccctgtcatggctcctgatgatgcgtgagagatgaactctcatttatgcgattgctccatccgtgccggctggtgtcggtcattcattcagcaaatagttactgagcacctactgtgtgccacaaaatgctagaaacatccataagcagagcagagaaccccactctggtggaggtgatggtgtaggcagggaggccgacaatgaacacagcaataagtgagacagcctgaagccaggtggaaagtgctttgagaacagaaacaggagaagagcctggactgggcacagggctggtctgggtgattctatggggaaggcgggatttgtgcggttttacagaaaattaggggccaggcatggtgcctctcgcctgtaatcccagcactttgggaggctgaggcaggcagatcacttgaggtcaggagttcgagaccagcctgactaacatggtgaaaccccatctctactaaaattacaaaaattagctgggtgtggtggcccatgcctgtaatcccagctactcgggaggctgaggcaggagaatcccttgaacctgggaggcggaggttgcagtgagccaagattgcaccactgcactccagcctgggtgacagagtgagacagtgtctcgaaaaaataaaagataaataaataaataaaagatgatgagggagccaagcaggcttctggaggaaaagcattccgggcagagggcacaggccatgggcaggactgcgcctggtgtgttggaggaacagcgaggaggccagtgtggctggaccagggtgaggagggggagagaggcaggagggaagagcagggagaggacggggcaggtcatgcagaaccctatgggcctcagggaggacttgggctttgactgtgagggcagtgggagccatggagggttgcgggcagaggaggaaccagacttgccccaggtgttcacggacaccctctggtggccgtggggaggacaaaccgtgaggagaccagggccaaggtgattgcactggttcaggtgagtcgtgaggaggctagaccgtcgcggtggaagcccttacagcagggaaaggcggccagatcctggatctattttgaaggtagagcccaaggaggtttcagatgggccagatgtgggtggtgagacacacagtggggtccagggtgactccccaaggattttggccttgcaggatggaactgccctcgaccgaggagggggcatggcaagagcagcctgcgggtgggagggacgcccgggagggtcggggtcccaaaggcaccaaaaggatggtgctgcttctgggcacgtgtgtgtgctgggggtggggcgtgtaatttaaaagcctaatgcgagtgtgtccgtcagagagaggggtgaggctgcgagtgtagaccccatattctagacattttgctccagaggggcagaaaaccaggcaggagctggaggggtgcgagagtcccgggagtgatgtttgtggggcgtccggtaggatgggaggatgggtcgggcaggattgggggtgcacgagggaggctgccctcgagtaaagccgggaatttgccgcccaggttggggaggggtctggcgtgagccggcgccggccgcgcgatacgagaggccgaccacccccttccccgggcgggcagcaggcgaagccccagggctcagcaggtgtgtaggagtggcctgcccggccccatcccagccccgccggcctccaggctctggggagcgctggagtccacagtggttttttcctggggagggcctcaaagctctcaccgccccctcttccctattcccactaggggagctggcatacagtaggcgctcaatacaggagcacaggagcctgggaggcggccgggggaccctccgtggaggagcctgtcccgcgccggcgagcagccccgggggcgcaggctcccccatcccctgcggcaccggaaggggcgggcggtggacgcccccgggcgccctgtcactgtgcctcggttgccaggcaacggggcgggcgggaagctgggcggggggcgcagctgcgccaggcgtgggtgacacccggcgggcgcagcgcgcgctgctgcaggcagccccctccgcggggcttagggctaggggcagggcattttgtgtctcagccagaggggcctggccaagacccccttcactagcccgctgcctcggtttccccacgaggtggatgaacttgggaccacactggtgggtgggacagagggattcagagcgtgcccacaggtggggactgccacgggagagaccacacacacgctggagtagggtttaaaaaggggcttgtttaattaattaaatacaaggatgaggccaggcagggcgggggaggggcgccacccacggaaagcacacgcctctcggagccgcctcccctgcaaacggctggaaccaggtcccagtgatcagcgactcctgggagagtggaggggtgggcgcaggtctctccaagcccctggacactggagaggggcccagttatagagttctggaacccacagccctacctacccctgctccagacaggcccctgccagggctggggccaaccaagactcacaaaggaaaacggggccccagtcccccacccacccccacagactaaggcatctcactagcgctgccagaagagggtttgaggctagggacagagaacacagagagccgagggctggatggggcaggaccctccgagcccagctccagaagggcgtcccctgcctccctccccccaggatcccaggcacccatccctggatcctgccaggccggggctgggtccaggtgcacaccagtgccatccaaagcccccctgtccccaagcgagaggcaggacggttctggaacaaaagggggtaccaaaaacctcctgcagccaacagtggggggatccacctttctgggtctgacatggaaccggggacccttctcattccaggctgggggtcctcaataccccccccaagaggaaatgcaacccaggccacagcaggacgaccgctgacaaggacacaaaggtggcccccgaggaacaagtccccaccccacccaagttcagctcagagaccccccacacacactcacaccccctgaggatgccggaccacccatgggggcccagaaaaaaaggaatccgtgcctgaaaaaatattctacccggtgcaaaaaaaacgagctaccccaggaggctgcacagccagccctctgcttccagtccacgaggcaagacctcaaccacgggccaggacccacctcttccaagcacccaggagaaggaggggaggccagggaagcagggccgggccaggctgcagcccaggcccggaagagcctgcaaccccggcgggcatgggctccacggccccacctgcaggccagggagggcagcgcagcccaacagccgcagtcgtcgttaagggagagttgattgtcacgtgataccgcaacggccaaagtcagcaaggcagggactggaggcccaagcccggtgccagcctcccctgcagcctctctcacccacccacccagagagggcgagctagggcccccacacccgaggacagaggaaaataaataagccaggattccctcccgaccccactgagtcaaatgttctttggaagaacccagaggtcccctccctccccatcccaggtctcagaagcaacacctggagcccctccgggcatcctaacgctgccccactcctggctctacccccgaggtctggggggccaggcagcccctaccgtgggcagaacttgtggacacctgagattgagtacccgaatggggggtggctgggctgcacccccatttccctgaactactcccatggctttcggtggggtgggggtggggtggggagaggcaggggccgtgtcaacccccgactcctctatggctgtctgaacacttcatcccaatctgcagggatggggcagggggtgctttccccgggccggctcccagaagtccactccacccccccaaaccccaccccgggaggggggcagcagggggtggtggagaggagaggggaggacctcctagctgccctgggggggccccgttgcacagatgggaagaaagttagtatcatggctatttacagacacaagcccccgtcacccatcctgagagccacctctgaggtcaggcagacccaggtccagtctcaggccccctcctcactctctggaggggggcaggggtgtcttcagggtttgcccacggctggaaggggcccaggctccccgtgggtcctcactacacccctggatggcagaagcatcctggcggtcagggtgggctgcacgagggccctacaggcctgcgggggctgggctgggcgcggggctgggcgcagggctcccggccaggctgcagggcagcgagtcgctgggggaggtactgcgggcaccagggcgccggagcaggtccgggtggaagccggggtggcggcgggcgtgcttggccaggtggtcactgcgggtgaagcgcttggagcacagagggcaggagaagcgcttctcgcccgtgtgcgtccggtggtggcgggccagctcgtcggagcgggcgaacttcttgtcgcagccctgccagtcacaagcaaaagggcgttcccctggacggagagacagagacagacagcgggtcagcgggggcggggggagatgacagacacgttccagcagatcccaaagggtggcgggcatttgtcccgtgccgttttagaggctgagctctggtgtgagttcaaaacatggagaagcacaaagaatacaacccttacccgccccccggtggcccaacacgagaccctaataaataatcctcttatttcctaccagctcttagaaaggactctccggcgagcccagaatctgttaaccgtaagtaaccgccgcagacccccaaggctgaagctccccaggccctcgcagcctctggccccaggcgggaccctggcagggattagcaaaggcctcccagtgtctgtcccaggcacaggcacgctcagaaggcatgctcggccttcaggctgtccctgccccccacccaggggcatgcaggggcctccatctgtgcatgatcccctccttttccaaatgaccacctgggatgcaaaggctgggttaagggggtacaatcatggcaacctccctaaccctcctggcccctccacgagcaagggggcatgggaggaacccgcaggcacagtcagtctgggccccgatctcggggtgtggttagatggaagacaggcaggaaagctcacagggaggggagggggcggggtctcccgggaaggggcggggcccggcgggctggactcgccccacccccacgggacagatggcgctgggcaggggcgggccaccacccggccacttcctccacagtcccctcccaccgccaaggccgggcctcgcccatcctgcccctaaccagccgtcaccatctgggcctgcctgtgcgcctccaggcggtgtgggtctttgctctagaactgtgccacccgaccccttcctttagccggggtctcacgcccacagcatgtggcatcgtgatgtcagcgtctccccagcagataggggtctccaacgactggggaggggcaggtcagtccacctccacccagggaccgaagcaggacaaagggccctgcatccccgaagctcccaccctttcgggccctgcaccaggtaccctggaccctggcattccgggacgttattcccgtgacaccccagggtgggttgtgtggatggagaccggatgtgcatgcccctcgtggcactggttggagccctgagtagcaaaagagacgtcagaaccaactcccctgagtggccccaaagcctattctcaaggaagccacagcagggccaggagggtagtcacccggtgggttacaaactgggcagcccacgcccagcactggaggttgctctggccctgggagcactcccaccggtccatgaagaactgcagccagccaggggcctagaaggacccacagcagggaccatggtgaggggtacagagacggcgggaggggcacggccatgctcagggtgaccgagtgacatctctgctctaagatcaggggctgccctggggagcccagctgaggaggggcacgggagggtggaggggtctgcccactgaggggcaccagcgatcacccgtgacccaagaagagctggaagaaaaaaccttcccttctcatctcatccttcctccctgccacaccccgacaccctcagcaaaacaagactgcagacagagaccagcagcccccctccccaagaggttgtgaatccaggcagctggagagggggagagaccagctgtcaccaagaccaacagtagcctcaaatccctggggctgcctgctccacaccccaagtctcccccaagcaacccaggatgcagctggggtcgcgggtccgccccagctgggggccgtctacaacccaagcaagaggcgcagagcagccctggaagggaccccactcccatctcaaccactgggccctgacagctcccaagggcctcagtctggggacggggtctggctgtgggagcgcggctggagcagaccacgggattggggctcgcgcccctccagggaacatgccgccgtgtcgccatcttgcaaggcacaggcggggaggcggcaggagggaagggggaacatcccacggctgggtgccggacagtcagttggttcacttcccctttcagggcggcggggctggtctccactccctctcccccagttccactttgcaaggaggagcaggttgccggggtggggggggcgaccggggcaggggcgcgcagccgctgggaacacagctgccgcacgtagctcggcggcggcggcggggacatccgcagccccagccggccccgctcacgtggtcccactcccgccggggccagggggcccgggccagggtcgcctctccggcctgggtgcctgccagccccgccccgcgcttggagactgaggcgcgcacatgcgcacgtgggtggcggggcagggggtgcacgggctacccacccacgctgcgctgggcgaagcgcctctgcgaaatgccaggccctgcctcgcacacaatccactcgcagggaggagggtggggtgaacttgtgggggcccagagcgcgctgctcctagccagccgggcccccaggtgcacagccacccagctgctccgcgctacctggccgagacgcagcgccctgaggatgcggtgggtggggacaacgcgggagggcagtgtgggcggggccgcggtggacttgaccctctgactcaggctgggcccgggtgagctcaggacagcctcggaaacaggcaggctcagaaaaatggagtccaggaagtcctggaaacctggcccggccccgtctgagccggcacaggaggggcctggagacaggactgcgggactgtgccaagggccctggttccgacagggaagcctcacctcctgagcttgtctggggggccttggggtggggaggggggctgtggccggctgcctgccggggcactcacgtccacctaacaggtggggtcgggtctgtaggggagggcacaggtggggaagaccagccccagccgcaaagcaagcatcccaggagagccaggaaaggctggggctggggaggcctcttacccacccagggaagggaggagctcctgaaggtgatccttgagcaggttctatagaacctataggcagctgcttctgggagccgctgcagaaaagggggaacactggtggtgaggccctgccagcctgggggtggggtctcgaatactactgggccatagcaacccccacacccactctgcccctagctcccctgacttcccaaagccaaagcttccttcctcccccatccccactcctccagtagacttcccctttccaaaccccctgctgttcccgccaaacacgcaggcaggcatacccacccttgtgtcaatcccgtacctccccacgtgccacctgccagccaaatcccatcaccttcgggatccgtccaggccccaccctgcccctcccagctcactcctggactagtgcagtagtccagcagctcccgcctgggcacccagactgcgcttggctttcctgagttccgccctggcctagggtcaaaactgatggctgatcctgcccggagcttctctgagcagcagtgcccctcacagtggcctggtgccccccaagcacccttggtcagcttctctgtctttgtaccaggcttccaaaaacgcatgcatcttgtgggtgtaatatctgcacccctgcactccagtgggagcagaaggcaggcacttcattgacggctgggtccccggcaatgcccagcacaggcctggtatacagcaggtgcttaatgcatatctgtggaaaaggagaatgcaggcctaggggatcaagctctggttccaacaagagcaagggcagataatgtttgctcagcatcttgaatactcctgtcctccccaccccgccgccaaactatcactactcccttctacataaaaggaggcccacctgaggcccaacccaggccaggacctcctgcaccagactctgggtacctgggggtcggcaggggacaaccccctcaaggaccctggtgcctgtgtaacctctgttccagaaatggtctaagccagggtggtgccccccgcccccacagctcaccctgctggtatcatgtgcctcctccccaccgatctgggctgcttttatcagagagcctgggtgggggtggttatcgccccccacaaccctgggggagccctccccatcccactagctggggcacctgcaggcagttccagctgctctctgcactctgcaggctggagaggcggtgggtgggggagggcagtccctggccccctaccccccaccccctatggcctggcactgccccactccgaccctccccagataagctgccagttctcccaagctctgcccaccagcactgccatcccaaccctacaggagcgcatagttctgcctgggggtggaggagagaatgaagtggggcatggctgcttccccctctgggcctcagtttccccacccacctgtcctcctggggccctcttcagcaagggatcagaaacctggcaggcactcagacactcctctgcacacctcgtcctgaggagtctccctccaacccagtgcgtagaccagcacgcctcgatccctcccacatctcgtcctgccctcctcaacccctctctgatcctaatcccttctccataaatggatttgcctctgcaaagcccagcctgcctcactgccgcccccagcgtccccaccctcgggattaagtgcagggattcaccttgccgaggtgccccctccccacctcaagtccctacctccacagcagaccccagagccagcacgcccttcctctcccattccctgccccacccagcccagtgggcctcaggctgcctcctccaggaagcgctttccgtcatcactagcatccctgttgccaccccccaccccgccccccgccaccacggacacagttccctaagtcctggggcgcggggactgggatgctgggtgctggcctgcggcaggggacttcagagtgggatacaactgggggtgaccctgcagccccctggggggcacctgacaaggtctggggacatttgtgattgtcacgactggggagggggtgctcctgccatggagtgcgtagaggctggggacactgcataaccccctgcagtgcccaggacagcccctccccagaaaacgatcaggccccaaatgtctcggtaagtgcggaggagagaagccctgggtgagaagaacccttccaggtctgagcccctctcctggggagggtgtcggcaaaccctctggaggtgcaggctgacggtgtgccgggcactggcatgccgggggcggggggggggccctccggggatgcagggggtttggagagcagggagccgacagccagcctctcctcccgcccccgccccaactcgctggctcgctcactctccgtaaccatagcaacggcgtcaacatcacccacagcttccaaagtccttccccgccccacgcaggggagagagagccgagagctggccgggctaggataggggctgtgggccagacccaggggacgggaggtgcagtcctgccgcctgctgcccccatgaagaacatcccactgctcccctggcctccctgctcccagggccaaatgtggccgaaatcacaggtggggctcctccagtgtgcctcagttggtttatctgtaaaaatggggccaggccacgactggtgttccctttacagagaagcactccaggcaggggtgggtgggggtggaactcgttctcaatggcccccgggacagccctgcagccaccggtgactcgggttcgtctgcggatctttcccggcctccactccattcagggacagccctgcaatggggctccctcccaaaaaaacgcatggccttcctgtcccccaaaaccagcttaacggcagccattccctccctcctccgggggctgaaaaaccagaccaccttccactaaaagaggccgtttacacagaccccttggtggtcctgggggctggggaggcccggaagaggagcctggaaagccacaagtatccaaaaccctttggaaaccgaatccaaggtgcctgggcctgggactgccctcccagtccccaaatcgttactgtaaagggggctttggaatgggacgtcagcaggctcaaggggtgggggagggtgccaggagatccgccctgccctcccccaccacacagggtagacggtggcgcgccatcagcacaactgcatccacccctggggatgcccgactgggcacccccaggcctgtttcttactgcaatcccgggataacaatactgccttcccaggactccaaacccatccctcccctccctgctggcttagggaccgctgccccaatacccgggggcctatggaagcgcctcttgggtgccactcagggaggtggccatcccgtccacttaacccagaaactcagaaaacccaaatggagctctcaggccacgccatctggcaagaaaagaatgacctgggtagacaggtgggagtcgctttcccaacaggctcccacttcagccccgtctgttcagatcgcccaacttacccccaaaaagccagggcactcctggacccctgcccaccgcccggagaggcacctccctttctgttcccaacgctgcctcgccatcttcacagacccccaatgtccctccccgcggagatacacggaccccattgccctcaaaaagaggtaacaccctgggacccctccgccgaggatgtgtggctcctcgcagaaaacgcagaccccacccaagtcctgtcttgacgccctcggttcccgtctgtgtctcaaggtgggcagagcctccaggcccctgggaccaggacagggactgagcgaggggtgaaaagagtgcagaacagagagggggcggccggcaggctacacaccaccgcccccacccgccctcctgctctccaccctcaggcgtcccagcgcggctccccataccccaaagatggaccctcaattcttccgcaaggcattcgcggcccctgctcatctcagccccaccactctggacggcccacttcccttcggctgctccacgtgtccctacaatccgagcccacggaccaagcctccttggagtgtccagctgcccaaagcggccaccgctatggctatgaaatagaggcagcatcgcactcttgatagaaatgagaaaattgagacccagatcgggtagaggtcttctgtttggtggcaaggccagaatgccaagcccaagggcagccgcacagctttcccccagccccccaccctccccggaagggacaagcacctctaatgcccaaaccagggccggccatcaaggcccaccgtcccctgttgcccagtccaaactcccagtccagaaagtggaaccctaggaggggacggagtgaaaaaatacagccaggcccaccaggctcccggttcccctcgccgccccggggactgcgctaggaggggcgttggtgtagccgaagcgctccaactacgcgcaccttcccgaatcgcccgccaggtaggggtgaacaaacacgccagggaaatacagcagtgtggacccgagcccctcgagggtcctccaatactatgaagttcccccgcccagactcaggccccaacccgcgctcctagcctcgccctccccctcgttaaaatacagagaacgcagagaaaacgtgccgggctccccccatcctggccccacgccaggtgctctgccgacctctggggagaatccgcgcggccaccccggcggcggcgacgcggttcctcctccattttcacagataaggaaactgaggctgggggagggggagaacccagaaccccagagccggatgctccaaccacggtgcccaccgcccagaccagaacgcaaaagaaaaaaaaaaaaacggaacaaggcccagaaagggagagaggtggtctgcccaggagtctcaatcccgcccgcagacctcgctgggcccccggagcccccgccactgccgccggggcggccatccgctcgccgcccgaccgcgtggccgccacgccccccgcgcgcgccccacccaccgaggccccgccctgccggccggcgcggcggcggcccgggcgcgcccccctccccgccccccacgcgccacgcagtttcggggtcctggcgggggaggggtctcaggcggccgcccccgcaagggccgggatcgcggctgcactcacctgtgtgcgtccgcaggtgcgactttaggtgcgaggacttgtagtaggctttggcgcagtccgggaagggacagcggtggctcttggcggcggcggagggcgcggcgccgggggcgcggcccgaggacggggacgaggcggctgaggaggaggaggcgggcgaggcgccccccggggcggctccgggtccgccgcgcaggtcggccaggatgctggcggccagcaggtggggcgccgcggcggcgccggggcccgggccagaagcggcggggggcggcgggggtggccccggggtcccgggtgaggcggcctcgcggcgcgccgcgcgcacatccaggccggcggcggggcccgcgccctcggggccgggccgcccgcggtgcaccacggcgcccgaagagatggccatgagcacgtcggcggcgaagtaatccacgcacgccacggccgccgacatgccgagcaagggcgcgcggcgcggcgggcggagcggaggcggcgggagcggcgtccgtccggccggcggcggctgctcgagtgcgggaggcggaggaggaggaggaggaggcccggcgcgcgccgccgccgacgcccgcgctcggcctgccccgccccgcctgacgcgtcctgacgcaccggagcccgcgggggcggccacagcccgccccgcccggaggacgccccctcggggcgccgcagccacgccccccgcccggcgcgccctccaccactctccgagccgcgcgcggccgccgggggcggggctcgggccggaggaacccgccccccggcgcgcccactccggcctccgccagcgcctagcgtcttaggcccggagcgcgccttctccgcgctagggtgcaaggccgggagccccgccccctcccggcgcgccccactccagcgcgcgcccccgtaccctttcccggagcaccaccccctcaagccggggcgggaggccgaggaccccgccccctctccggcacgcccctccttccgagagcgcgccccgccccatcccggcacgcccctccctcccagagcgcgccccgcctcctcgctggcgcgcccaccccacgccggggcgcgcggccggcgggagcccgccccctccccggatgcttccctcctggccccgggcgcgcccccgttcgcgatggaggagggctccgatccccacgtggccggggttggaggggtgcggaagcggccggccccgcccccaggccacgtgcgcgacccttcccccctcttctcccggcctggggccctgctttgaccccgcactcaggcatctgctcgtcctcttctctggggttccccctcgccgctcacagagcccctcggagcctcccggccgagacacccggtatcccgcgcccgcggcggggcccgggagggtggggcaaggctgcgttcgttcctctttttgcacccagttccggagctactagagcgcgccccactgggggtggggagggccggttgggtcccagagggtcgggatagggggacgggaagagggggccgaacgcaaagggctgggctgggctgggggcgcctgagcgggtcagaggttccccgccctgctgggacaccggggtccggggcttctctttccattcccaggcatcgattcttggggttcggacgggaaaactgaggccaggtattcgggcctcccggccgcgaggacgtccaggccaacttgttaaatattaggggggacaccagggacgcggatggcccagttcgcaggcccaaggcggcgggggcacagaaactgggcggcccccctcggtcgcgaccgcgctcccgccccttcccagctccggcggggcggcggggactgcgcagtggccggagctgcctccagggggcggagctgctttggcctgcggcgacctcctgctctgggttgggcatggacagaggccctgacccgattcggggcttctctagccccatcccccgcccacctgcaaccccagctgacgccctgaggctgaccactgttccctgggtcgcccgcactgcgcctgggctcaaccatgcttggttaagccagctgagccctccctgggccccagtaagcccactctacgtggctggacagagcggagccgagagagaggaggttcagcgaagtgtgggagggtacagggtgccctgcacacacttgcccctctcctaggcctgggctccagagccctctctgcacccctaccattcggtgggcgctgggggtcggcgttcctgctcctgctgggcctctgttgtctttgaacttctaggacgatgggccacttgggcaggtcccccaggtccccaccatcccagcagcccccagggtcctggaaccccgcattggcttgtggacaggtgtgtcttgaggcctcagggtccacacccaaccatgcgtcttccactgatgtttcctgggcttagagcagaaccaaccagccctgccctcaaggggcttacagttgtaactgggaggctaacgatggggggcaggggtgagcagcctccaggggtgggccacatggccccaggcaggaccttcactgtgagactccattgtctgcccactccagccattatcagggtttcaagtgagtggcctcatctgcaggtcatgccagccactccacaggcaggagaccccaggtgagggcacacagcccacaccccacccatgaggcttctattcacacccctaagccccaggaacactcaggcaacccatgacccctgcggtgaacacagacaaacctccagcagcgcccggcacagggctctgtcctctcttccttactctctatgaccctgtaaattctccaccgggtgcggtggctcacgcctggaatgccagcactttgagagaccagggtaggaggatcacttgaagctatcagttcaagaccagccggggcaacgta[137 bp omitted]gtggtgaaatcccgtctctactaaaaatacaagaaaaaattagccgggccaggtggtgggcacctgtaatcccagctactcagaaggctgaggcaggagaatcgcttgaatctgggaggtggaggttgcagtgagttgagatcgaacattgtacttcaacctgggcgac[226 bp omitted]ggggtaggagaatcgcttgaacccaggaggcggaggttgcagtgagccgagatcgtgccactgcactccagcctgggtgacaagagagaaactgtctcaaaaaaaaaaaaaattagcgggcgcagtggcctcacacctgtagtcccagctactcaggaggctaaggtggaagggtcgcttgagcccaggaggtcaaggctgcagtgagctgtgactgcaccactgcactccagcctgggtgacagagtgggaccctgtctcaaaaaaaaaaaaaaaaaaaggagttgtcattcccattctacagatgaaaaaatcaagactgggagaggaccgagaacagccggctcctgctcacagctaagaggcagcagacactttggggcatccataactcagccccttctttcttcaaacctgttcctcacctataaatgggggctcacctctacccttccctgacagcgcccaagaggatcagggggacagctcctcccagccccaaagatggacctcccaagcctgagggctatggagcaaagctcagcaggggacagacagcacccaggtgttgctgggagtgggtctctagcagggcaggaagaacacaacgggactctcagaggggccacggagccaggaactggggccttgcctcatagagggcaaagaacacagtctcccagaggacagatgagggcagaggtcacataaccgggggtgcacccacaacatggataccccaaggtaggtgagggccaaaaacaaggctgcagggccgggtgcagtgactcacgcctgtaaccccaacactttagggggctgagatgggaggactgcttgagcccaggagttcaagaccagcctgggcaatatagtgagacccctgtctgcataaaaaacaaattcaaaacttacccaggcatggtagtgcacgcctgtggtcccagctcttcgggaggccgaggcgggaggattgcttgcggccccgaggtcaaggctgcagagagctgtgatacaccccagcctgggcaacagagcgagatcctgtctctaaaaatagtgatagattgtctgggtgtggtggctgatgcctgtaatctcagcactttgggaggccaaggcagatgtatcacctgaggtcaggagttcaagaacagcctggtcgacatgatgaaaccctgtctctacgaacagtacaaaaattagccaggtgtggtggggggccgcctgtaatcccagctactcgggaggctgaggcaggagaattgcttgaactggagaggtggaggttacagtgagccaagattgtactactgcactccagcctgagtgacagtgagactccctctcaaataaataaaaacaatagtaaataacaaagatgcagcagaagagggggtaatatgtaaggacgtgtgtgtgtgtgtgtgtgtgtgtgtgtgtgtgtgcgtgcgcgcatgcactggaactgccatatcttcttgatttaagacagtcgggtctttgctttgtgatagttttaatagtacttttctgtagtactcaaacatttttttttaccatgtgtatttactacatgcctctgaatgtcaacaggcatctaagcaatgcaatgatgggccatttgtcctttcatttttaggcttttctgtatgaaaattcatcttctaaataaaactccccccaccccctgcccagtgtgggctggactgagggactcgctgccgcagaacagggcagggacaggagacgatggcaatgggccccgggacatccagtgaccccacctgcaccagggggccgaggtcaacatcaggggtgaagtcgtcagggtctcggcgacccctgctaggatgtgaggagaaaggggcctccaggagggtgtcctgccccaaaccctgtcacctca[138 bp omitted]tctgcctcccaggtttcagcgattctcctgcctcagcctcctaggtagctgggattacaggtgcccaccaccacaccgggcttttttttttttttttttggaaatagagtttcgctcttgttgtccaggctgcagtgcaatggcacaatctcggctcattgcaaactccctcctgggttcaagcaattctccagccttggcttcccgagtagccgcgattacaggcatataccaccatgcccagataatttttgtacttttactagaaacagggtttcatcatgttgaccgggctggtcttgaacccctgacctcaggtgatccacccacctcagcctcccaaagtgctaggattataggcgtgagccaccgcacccggccgatgaggggacgttttacagaacacttgagcaggcctcctcaagactgtcaaagtcattaaagacaaggaaagcctgaagaaccaagatagacttttaagagactcaagagacataaggatgaaatgccatgtgggaccctggatgggggccgggccaggaaaggaaaagactttgggggaaaacaggaagctggaacagagagcccggggtttcactgtcagagctgtacccatgttaatctcctggctttagccaggcatgatgactcacgcccgtaatcccagcacttccagaggccgagacaggtggatcacttcaggtcagaagttcgaaaccagcctggccaacatggtgaaaccccatctctactaaaaacacaaaaaaaattagccaggtttggtggtgggcgcctgtaatcccagctactcaggaggctgaggcaggaaaatcacttgatcccaggaggcggaggttgcagtgaaccaagatcacaccactgcactccagcctgtgtgaaagagtgaaactccagctcaataaaaaaagaaaatgttctggttttgacggggtgttaccacaagggaagccagtgaagggttgatgggattctctgcaccacccgtgcagctcttctgtagacctcaaactattccaaaataaaaaatgttttattattgtctttaagatgagatttcactgttgcccaggctggagtgcagtggagcaatcatagcttactgcagcctctacctcctgggctccagtgatcctcacacctcagcttcccaagtaactggaaccacaggtgcacaccgccacgcccggctaaattttttaaatttcattttctagagatagggtcttacttttgctgtccaggctgatctccaacttctgggctcaaacaatcctcctgctttggcctcccaaagtgctaggactacaggcgtgagccaccacacccaacccaagataaatactttttctttttttttttttttttttttgagacggagtctccctctgtcgccaggctggagtacagtggtgcaatctcggctcactgcaacctctgactctctggttcaagtgattctcctgcctcagcctcctgagtagctgggattacaggcacgtgccaccaaacccggctaattttgtatttttagtagagacggg[146 bp omitted]ggtgactggactgaataataataatgacaatggcagcacggcagcagctcacatttgcagcactgcttggagttgctttaaagtccactcctagaaaggcacccaggaaatactcctaagggccagggatggtggctcatgactgtaatcccagcactttggaaggccaaggcgggagaatcgcttaaggccaggagttcgagaccagcctgggcaacaaagcaagactgcatttctacacaaaatacaattagccaagtgtggtgacgtgtgcctgtcgtcccaggtaattgggaggctgaggtggaaagatcactcgagcctaggactgggaggttggggctgcagggagccatgatcacaccactacactccagcccaggtaacagggtgacagtctgacccaaaaaaaaagaaagaaaaaaagaaagattcctgattcctggcctggcgtggtggctcacgcctttaatcccagcactttgggaggcag[134 bp omitted]gaggcaggagaatcacttgaacccaggaggtggagattgctgtaagccaagattgcgccactgcactccggcctgggccacagagtgagactctgtctcaaaaaaaagaaaaaagaaagatccgtaaggaaagagtgcacagggttgtgcactgtactgctggtaacagaaaaaacagggaatggaccccagtatcagcggcggggtcacagagaccctgaggctgctggagaatcaggcagaaccgtcagtcctgctgcagagcctcacagatggggtggcaaaagcaagcttcacagtaaagcctgtgccccagacatggcctcaattctccgtgtgttgtcacctgtacccacaggctgtttattcacggatgacctttgccaacctgtggaagccacctccggacaggcctgcagggacccagggccgtagcaggagggactggacgggctgcggaggtggccatgaggcctgcagaggacgcactcagcggtctgtgccacccatttgagtatctgacggtgtgaccctgacctctcccggtgatcctgattgtcaacaaaaccctaaagtccccacccccccggggctggcgctcctgcaggacactgtggtctggtgatagcctttatttacattactgcaggtgttgcattatgtgaccaaaacgccgacccccaaagccactcagggtatatttctgtgttaaggcgttaaatcacttaccatggtccagtccaggggggccaccacgcacggtggggggcgggggggcagctgcaagctcctgggggacagaggacaaggttccaccagccaggtgggaaggtggggcagcagctgccaccctccaaccggaggacacagcgaggtcaccctgctggccgactgcaaggaagcccctgcgtggggtcctgcagggagcatctctggggtccacggcatccatgctaggagctgcttcagggacaccaaggcctcctccatcctgcacagggtgggcagcaggggcaggatccggctggcatttcctttcccgtgcgaatcccccaacccctgcacccccagcccctcctcagcaggactgcagggccagggccggggattttatctgcacagagtcgggaggggaccaggacccccaggcaccccgcttccttggcctcccaaagatgatgaaaagcttccataagagctttcccccttgaacagggtcagacaggtggcggtggtttttcgttgtttttttaagatggagtcttgctgtgttgcccaggctggagtgcagtggtgcaatcttggctcactgcaacctccgccccctgggttcaagcgattctcctgcctcagcctcccgagtagctgggactacaggcgcccgccaccatgccagctaatttttgtacttttttagtagagacagggtttcaccatgttggtcaggctggtctcgacctcctgacctcaggtcatccaccgcctcggcctcccagagtgctggcattacaggcgtgagccaccgcgcccagcctagtggtggggtttcagggcactctgctaacagccacaggcttcattcacataaagcaccccgcctgggcctgttccctccgtgaggctattggggagggcgggtcccagagtcgcgctcttatcctccacggacacacacactgcctgttctgagctccacttccggctgggtgctggggagagaataggctctggtctggcgggaggtgctcgctgtctggccgggcagatgtgtgtcccgggaccttatttctgagccacctgtgctgtcgtggctgggagacgccgagtgccgagggagcgcgggcctggccggggtctcggctacttctctcggtggggaagcagggacagtcaccccagcagcccagaatcgttgtgaagatcgacgtggcccgtggccggagcccggaaccgggagggaagtgggaccaggggcttgtgctggcccctgggccgctctgataccagttgggcgcccactggatggactcccagttaacaaggcggccctgcactcccaccttgatcctgacacccggactcagaggtggacaggcaggtgcctgccataggggaggaaagaggaggcgcctgctcccagaggccccacctcaggtcacggccaccacaggccaagaggacagaatcacagccaagcagggatggtctccatcctcttccagaaccccagagggccctcaggtcatgcagaacagagccagccgggtgggtcccaccagcttggcattaatgggacgacggatgaatgcagccacagcgtcataagagcttggtcagccgcccacacacacatgctgggaccccacgaatgccagtcggggctgacaggccactggtcccctggggagcagctggagggtgcacagccctgggcaccgccccagacctgacccactggaagggcctagcccacatctcaggcaagcctctgccacacccacagccatgctccagccactggccctggggagggtctgccctccccccgggctccgggtaccagagtgggcctaggccatagggtcacctggctggtgtctgtcccgtcacccagggccccgtgctggggtgtaccaggagcaggtgacacagggtggaccagagactcagcccccaggcgccctacccgggagaacgctgttgcagggcttgaacaagtgtgtcctggaaaatccacaaaatggagaacgggaagttggccctactcccaggtggcctggccccgggccataccaagtgggaggtggggagagcgcgcgtcctggaatagagtgctggcctcccctgtcgccacccctgcggggtcctcccgggtcccaagagcagggggtggtggggagaggccgagggtggaagttggcctgacagcctggagcctgaaggcccggactcggtttaccccatgtgagagggacaggcagagggaacacagtgtacgctgaaggcgtctgggagccctgccgaagcctcggtgctgagttcgcagcagcttgagaatggggctgcctgaaaccaaggccagcatcgcgcaccgtgaatatccacagcccgcagggagggaggggcggccccaaatacttcgatttccaaaatcctcttcatcacagtgtcttgtggaactagtaccacatggatcagatgaagtcgtcaactattttaagatgagaattttatctcagtttgatctgtaaatctaagaatctaagcaatctcaatgttttcaaagaagatcacggtgggagaaccagataaacttgcctgctgttcaggagaaaaaagaaacgtgcaaaataatgcaaggaggaggggcctccggacatgaggtcaggaagacaatggggttctggaaaactgggataagagtctagggacagacccaaatctacttgccataaagacagcacttcagtggggaaaagaatgcttttttgggaaataaagttgggacaatttgtggaaaaaaagttttgcttcctaccttactccttaccaggaatactttctaaaattagacataagcatttaaatatatggggaaaaaaaaaccccactacatttctagaagaaaatctcaaatgttttatgatcttacagcggagaagatattcctgagatgacacaaaaatgcaggagccgtaaagagaaaaaaactaatgaccagtaacaattttagatgcttagcttaaagaaaaaaatacaaacaaagtcaaagactaatgacagatagaaaaaagaaacacttccgggtcagccgagaaatggtattcagcaataaatgtgtcagagtcccaaaaaaaaaaaaaaaaaaaaaaaaaaaaaaacacttctactagacagaaagcgaattttcttaatctgtaaagtgcacctagaaaccaccaccatccacccaacagaaaaatgagccaagaagataaaatacaaatggcttttaaatagtcaaacgtttataataaacatattttccaatctcgaaacgactgtcagtggtaacaatgatcaacgtaacatagatgtaacaggaacatcacgacgttcgactatacttacaggaaacacaagctacagtgaaatactatctcacgcctaccaggtctgcaaaatccagcttgggcaagggtgtcgccggccccctcttatgctggtgggggagggcgatttggtaccacccctttaggggcctaaatacagccctcgcacttctgcaccaaggaatttaacctaagaaaatagtccgacttgggcaaaaaacggtttgtacaagcaatagtcaagctagcattgttcgttataaaagacagcaaaaaccctaaatttctacaggaaaggggataaagtctggtgctataaaactccgtttccggaggaatcccacctgtatctgaatgcatggggcgctctccgagctacgttaagtataagagccccaagtaaagtaactgaccttttgcagaaacgcacgtagatgttcctgcatagactttctttgcagacccgtaagaaacgggtttccctctgccccaggggagaactgggccttggaggttaggactgggaaaaacacatcaagtcttcaccaaataccctttcaggctccttgaattttctactctgtgcacctgaacacacttttgttctcttgcaagcagttgctttgcactggaggcaatgaagacacggcggagtcccagctcgcagggagctcaggttctgacggcgtcagaggacaacacgctctggaccagcgcagcgcccaagggtcagcggcagcagcgagcagggggcacgggatgcggggaggctcttcgggaggcatgaaaggcagacgtgttccgaaacgtgagccgcgctgaggggcacggcgcacgaccggggacagaaggaagacactgcggtcgcaaagccctggccgtgcaaaggccccgtggtcagccaggagcccaggcgtcccctgctctagcgaggtttccttccgaacgtcccgtagcaccgcttaccatggaacggcgggcgctgcctcgcagccccgaccccgcggcggcccccacgggcctacgaggaactcgaggccgagggaaggagtgagagcggccggaaaggggcagggccgagccggaccggtacctggctgggtcccagcggccgccacttaccaccgaggccgcctcttcgtccacagcctgacgccagccaccgccgccgccgtctccactgccgcacgcacgccgccacttccgcttccgtccgtgctgcggccccgcacgtgacgcagcgccttctcgcgcccagactgaagcaccgcccccccttaaaggggccgcggactagagctagctggatgcagcttgggatcccggcctcgccaccgcctggtcgcgcgacacaggctgaaccctgcccaaccctaaggtggacaacaggccaccggttcccgagtcctcccggtcctaagccttctgccctagagatcgtaggaactcttctcgtgatcccagctccagtgtcggctccctcttccaggggagaccctcggggcccaagcacctgccaccgccctctgctggaccccagcttcgccatctacgaaggaagcggcctgtccgagctctgaggtccgtcaagcgcggcacctcaggacccagagtgcgctgtcctggcccctctgcagtaggactgacgggaagctgtcgagggggcagtcccgcgatggcagcagggcccccacgcctggcgtcctcatcgcgcccacccagcagggctcaccagcctccctaggaagcaggcaggggtcctgggctcaaacgctgccccacccatcatcgcccaggcaaccagctccctaagggctccccggactagacagagacccaccccacttccgcagagtaaaacctataagggggtccgtgccgatctctcctagggactcagggacgaaacctgggaaccccggccccctttcgagctcgctgagcgctcgagagagtgagcagagccatgaaaggaaggagagcagccctaaaattttaaatctttaatttccgttttcacgtattttcttcttgcttccaaaaggaaaggagtgcgtagctctgttgcctgtacatcgtccacagcccctgggtcggggcggggtcccctgggccgcccggggggtccacatgcagcccctgggtgggggccggcgcggggtgaggtccgggggccgccttattgctgaggtccggccggttggggccgccgctaggcgcgctggctgggcagctcctgggagatgaagcgacgcaggcgctccaggtactggctgtagagctcgatgtcgttgtgcccggcgccctccacccacagcggctccaccgccttggggcagcgctcgtagagcgccagcccgtgcgagaagtcgatcacctcgtcctccgtgccgtggatgatgagcacgggagacgtgatcttggacaccttctcgatgctgcgggagggtcgtggagccggtgagacttcgcgcccggcccgggccccgccccgcccccgtccccgcccgggccgctcacttagggaaggcgtcgaagcagtaggtcttcttggtgtcggggaaggcgacgcgcatgcccgaggtgagcggcgagtgcagcaccaccgcggcacactcgtagcgcgaggccaggtccacggtgggcaccgtgccgatgctctgcccgtacaggatgatgctgtccgggctgatgccgtacctggcggcgccggagcagggtcagccgcggcctccgacgcgcgcgcacccttcccaccagcgggcgtccccgggcccagctccggatgcgaccctccagtctccccactcagccaagtcagtgggtcaggctcaggctccacaccagtcccgagggccacccccagcccccaacaccgtggcggtgggcgaagccagcggccccgccccgttccctgcgctgccgttcactggcgtttcctagctaggatctgcagggatcctgcctacggagtgcccctggggcgggggtaagggaggccctggcgcctctcctcctcctggtcacccctaggtgcacactgggaactgtgtggcccccacatcctgaatgcttcacaccttcctgccagggttagaaaaccgttcctggtgcactggccaggacagcggacactattcctccctgcagcccttgcccacccccttggccatgaggaattcaggcagctgtgtccccaaatgtctccacccaattttggactctcggagtccccacgcccaatgagatgccagtgcaacccaggtcagcatcgagggtggtggctgcggaggtggcaccccctcccaccagcaccttcccttgggagtggacaagtcctcggccacctcagcaccaccagctcccacccaggggcaccctcacccccaggtcattggtgtgcggcccctgacccagctgatccagcaccagttacaaggcctcctcgtgcccagtcccaagcacacgggacccacctgccaccctgcccatgccgggaccccacaactctcctcccacacgctctaggctctgatcccaggcagacgccctcttgcaaggcaggagcatgggcaggtgtgcgtcccctctgcctggcatctccaccagcagggctgtccccgtccctggcctggaatcccagcctcctggcagcactccacagctcgccactcacccatgccccaaaggatgctgcctggctggtgcctgtggctccagctctgcctcggcctccctggcctgctccctggcagccatggtcagtagtgtgctgagccagcccagccctgccacctgctacaggcaggagccccgagctgccacctggatgtcaccactcaaacgaacaggacacatccccggtggaggccctgggcacgctctggcctccccctcacagctctgggcctaggttcctgcaggacaaagtggcagcaggacagatggccgagcagacagagctcagagctggccatggcaggtgtgactctgccagtggcccaggcagtagagacaggaggggccgaggaagtcgcatgaagtggtgattggtgtcagcgtcccacactgctgggaggcccccagagccagggtggtgccaggggaccagctcccaggcccactgcagggactgcctgcatatcaccaaggcaacgacgaccccacctccctagggcctctgacttctcagagctgtgcctggtccctgtgggagcaggtcagaccagtgggctgggcagggccaggacgagacaggcccagtggatggtgagcaggaaaagccaccagaggcccacccgggtctcctcgtccaaagcagcactggcccgggcggtgctcaaacaccggtgaagggcccaggcaagcgcagggctggggacgtggatgactaggagggctggatctggaatcgaggctggcccagacctcggatgtgtgctgcgggtctgcaccttaccctgtaggccctgccccaggatggccaagctccgcagccacagggcctcatgggccagtcctccggacctggatgcagcagcctcgcctcacttggccccaagtgctgcctcggccgatgggctcccagccacacgtgcacagacccccagaccaccacccactccctcccgccgggtggcatccacacccctgtgacaagctcagccccttcccatcctcaggccaggggttcccagggaacctggctccacaggccagggtgtgggaggaccgcctggccacacctcagccatgtggaggcggcacctgcacacccaagctcgcctgtccggctctctggccctgtgcatccactgtggctcccctcctgcagggccgcccaccttcctcccagggaagcccgccccccggccccccgcctggtcccctcttgggtgtgcccaggctgagctgcccccagggtcgccctcacctggtgcgcagggcctgccaggcggcgtcgatgtcggcatagaggttcctctcggaaggcctgcccgagctggcaccgtagccggagtagtcgtaggagaagatgttgcagtggaggcgggagcccaggccaatgtagaagctgctcatctggcccaggtccacggcattgccgtgcgagaagaggaccgtgtacctgggacaggccgagaagggccgttcacatcctcgctcccagcgcccagctgcagggcaggaggatgcgtagtgacagcccaccccggtggccagccatgcccagtgcctcatttactcccctcccaagggggccagaagccagtgaatggagaggggaggctacgacagcacagctccatctccgagggttccccatggggagaggacaggacagctggcagggggacaggcagcctgggctgcagaggccagccagggagcctcaggattcccatctgtgaagcgggacactgggaccatcggtcgcatcctctctcagggcagactcgcagtgtgtgctcagatactgcaggcttcactgcccttcctcctggaagaacctggacccccggggatggagcgcacaggcccacctttcaggaccttcccaggggagcccatgctgctgctggcagggctatctcccctcacctcacagaatggtgccctcactgttggggcacaactggaccccacccctgcccccaacaagcaaatgcggccaatctctgctcacactcatgcagcccctcctggcccaccaccctgcccaagccccaaggctgtgctgcaaggcctgtctgcttcccagcacgggagctgccccaggtggtgccaggagcaggtggccaggctggccctgccatggactgcttcctccagttcccccaggcccccacctagcccagccagaaggtaaaggctcgccctctggactcagatctggtcagaaccccacctggcgagaaggtggatgtacccgcaggccagggcagcccctgtgccccagctcttgcccagcaggcaaccaccaggcgctgggttgttggagtcgcccagcctgcccacccatgccagctggggatggcctccctgagcctggtgtccttgtctgcgagagaaaattgccagagggacgaggccggcctgacgggggataccacccttgctggctggatggcccttcacggcaggctcgggccctcgggggcaccaccaaccacaccaagcaccgcaggcagaaacgggagccccaagaacagggtgacccagcccaggcgcggccacagctgctcacctggcaccaggcacgcagcgaacatacatgcaggagacgcggttgccgcgggcgctcttggtggggaagacctcgatggtgtccagctcgcgctggctgtactggaagtcggcacgctccgtcaggtgcagcttccagcgcccgggtgcgcccgaggaggctctcagggtccccaagggggcggccccggccccaccaggccccggctcgggctcaggcaccagggagtaggtggcctccggcggcaggaaggcgagcttggcagcgatgcggccggggcagggcgggcagcagaagaggcagcagagctcactcagcgacagcccattcatggcgggcgccgcccaggccgggcctccaccggggcccccgccaacaacgccgcccggcctggcccggcaggggaggggtgggggtgctccgagtcgcgggcaggggggagagcgcccccccagctaccgccccagacagcagccccgttaggaggccagggcccagccccatcgcggtccaagccgagccccagggagcctcgcaaccacaggtctccatgtcgtgccgtgggaagccctgcgggggaacagtgacatgtggggtcctttgggggtgccacagtccagctgggcacccccgggaggcggggcatccacccgtgccagggggcggcatgggcccggggcctgtcagtccccatcccctcggccctccccacggcctgtcaggcactgcaccctacagctcaggggaccccaattcagccccctctccacaggatgaaggaacccccaccttccctgagctggcgatcaccacctcttgccatgtgagtacagccatggcatgcggggcatgcaggggatatgaccccagccccgcccacacccccgaaacgcccggctccagcaccagggaaaccccatgcgccaggactcggtccgcactgctgcccactccctcccccggcccatctctgccaccctatgggtgacgggccgctgaggcaaggacagagctcgaactgaagggacccacgagggacccgaacaggccccgctacgtgagcgtgcacaggcgccgggtcccaccggcctgcgatgtctggagacagaggaaatacaacaaacaaaggctctagaaacaaaggcaggatacatcccaggctcctagggcccccagagcagcaacaatggctcttctctgtgctggagccaggcctgctgaggggcaggggaggtgggctggcgtcagggggtccttctccacccctgacttagggttccgtgaccgtgggcgagtcccttgccctcctgaggcctcagcattctcatctataagtgcagacaccacacaccccacaggaagtcaagtgaggggggaggggaacgaaggtgcctgattgagagtggaaactcggaccttcttccttgctgcagaacgtcatgaaacacattaagtcgacaacagctaagttgctaaagcaaccacaatagtgtaaggacctgccaacagacagacgtgaagaaaacacgaaggtctgagacgtctatctaccgaccacgcttctccttcagactggagcgaggagagagacacgctcacaactcaatttcagcagaacaccctggaatgcttggcttttgggtcacagcatgagaaaaccgtggggccaggaagatgaggctcaaaggcagatgtggacacagatggacatgcaggcagctgcaggcgccacagacacggctcgtggggacaccctcactaccaaggagcagcctcaggcccagaaacacacctgctccctcaggacctgatgtgagacccacgttcctgtgagccggactcatgggcacacgaggaggagaggagagagctctgaaagccagggtggggcaaggatggcatcccagtgcccccagactcccaggcggaaggcaaatcgcacatgcaagcacttttcagccgggaggtggactgtcaggctggttctgcttctcagatggaggcgagtctccctcctggagacacctgtcaatgtctggacacagttttgggtgtcaccactggggactgggtggaggctgcttagcaccctgcagtgcccaggacagacccaccccaaagaatgatcaggcccaacatccacagcgtcgaggttgatgtcagcttttcaacatattctcaaagaggtccaggccctaccggtgctgccccgctggtgctggggacttggagggccctgcagtttaggtggcatcatgcagctgggtcctgagagcccagtggacagcagcaggcccctggagaccccggagacgaaggggcacaccgaggtggccagggccccactatccaggccagaaacaaagatgttatccttgacacctccttccacccactggatctgagccggtccatcaccagcccggtggctctgcctgtctcccatcagccaccgcccggtccctgcctccatcacctttcaccagagccacagcaacagcctccctccttgctgatcacctgctccaggacattctcccccagcagccaaacaatctttcacgacacaaatgcaatggagccgcttccctcttggggtgtcctgggggcctcccattattccctggatagagatcaaagccctccccacagcctgccaggtccgcattccggctcaggccgacctctccagactcactcatctcacaccctgccactcctggctccctcaagacaagccaaattgccccttcctgcctctgctcctctgccaggaactcccttccccaacctcactagacagccttgcccaacccaaccaccctttgcacctcactgccaacgctctcagagtcctcaaagctgggacaggaccccttacacgctctttccacagcttgtatttttcacacgtttggccagatctccccccacctccaaaccagaaactctatgagagcaggaccatgacctgccactcactaaaggaatgggcaggtggtaggcagcacagaattaaggaggaagcacaggaggaaaagaatccccaaggtccgccagctttgacagggaagggaaagtctagtctcctctcctctccagccacaggtacctggaacctccctagtgtcactaatgggcgtggactggggagtgcaaacccagacgcctcactcactgggcacacacccttgacaccctgaatcccaccaattccgttcccacgcacttaactgggcaaccctctgcaagctagaggtgttctgaggaccagcaagcaaccgagcagccaaaatactggaagatgacctacatatgggagacggtgactgcacctcactcaaccagtcagggtgggaaacccgcctggggggaggcgcggccatatcagagggcagacaaacgggccaggtgacagggggatgggacagagggacaagcaggagcaaaatccgaggtgacagagcaggctcctggctagagcagaccctgggaggaagaagtgagcagaagggtcctaagagagagcctgggacgggtgaggtcgcgcccccgagagtttgcacttcatcctgggagaaatggcggggccgcgaagaagtcccgagcaagcgatggacaacataggagaagggctgcatcccggagaacggacgcgagcggaggccgggaagcccgcccaggagtcagggtggcaggaagaagcctgacaagggaaacagcgactgggagctggttgggaagcagggctcgggagggcccctgggagctgccttggggggcgagaggccgaagcgtttgtcggactgggggcagtttcggggcaaaagagcggaatccgcggctcggacgggtgctccccgaaggcaagggccgcgtccgcaggagggtgggagcgcaacccacgccggagggctgaatggatggggacagggctttcccaatcacagacgctcatccgcggtccgcgcccctgctctgggctcctcgggcaggacccgcggaagccctgggactgcaggggtctcggggacgtccaaccgggctgtcaggccctcgaggcccggcccgggaccccgcgcggccgcgcccgcccccgcccctgcccggcactcaccaccccggcccgcgcccccgggccccagggccgcgctccatggctcccggccgcccgcccgtgcgtccgtcggtccctccgcacccctgcccggcctcctgcaccgccaccgccgcagctccccccacggacggaagtgagcctcgttctcaccaccgccccggaagtgacgcgaggagcgcgcggggcgggggtctgcaggcacagagcgaccgcgcgactagcgtcctgggggcggggctgatatgtcgaggggcgtggcctgctgctctgtgggcggggccaaacttaggtttcattcacttggggacccggaataggttgaggccagtaaagttctcgcctggaaaacaaaatttacagggacgccaaaaaaaactcagacatcaacatttagaaatgttttaaaatatttttctttatgagatggagtcgcgctctgtcgcccaggctggagtacaatggcgcgatctcagctcactgcaacttctgcctcctgggatcaagcgattctcctgcctcagcctcctgagtagctgggattaccggcgcccaccaccatgcccagctaatttttgtgttttcagtagagacggggtttccccatgttggccagtgtggcctcgaactcctgaccccagaatcctcctgcctcagcctcccaaagtgttgggattacaggcatcagccaccgcacctggcctcttttttttaacatagagtctactctgtcacccaggctggtgccatcatagctcactgcagcctcgacctcccaggatcaagtgaacctcctacttcagcctcctgagtagctaggactataggcacaagccaccatgaccagcttatttaaagtctttatatattgctcatcagaaattcttttgcattagtttttaaaatattacattaggccgggcacggtggctcatgcctgtaatcccagcactttgggagactgaaacaggtagatcacctgaagtcaggagtttgagaccaagcctgaccaacgtggtgaaaccctgtctctactaaaaatacaaatattagccgggcatggtggcacgcgcctgtagtcccagctactccggaggctgaggcaggagaatcgcttgaacccgggaggcgaaggttgcagtgagccaagatcgggccactgtgctccagcccaagtgacagagcaagaagactgtctcagataaataaataaataaataaataaataaataaataaataaataaaactatgatcactccactgcattccagcctgggcgagagagcaagatcctgtctcttaaaaaaatttcattatgggctgggcgcggtggctcacgcctataatcccagcactttgggaggccgagtcgggcagatcatgaggttaggagatcaagaccatcctggctaacacggtgaaacctcatctctac[139 bp omitted]gggcgacagagcgagactccgtctcaaaaaaaaaaaaaattgcattatggcagggcctagtggctcacgcctgtaatctcagcactttgggagaacgaggcaggcagatcacctgaagttaggagttcagcctggccaacatggtgaaatcctgtctctactaaaaatacaaaaattaggccaccctggccaacatggtgaaaccccatctctactaaaaata[131 bp omitted]gttactggagaatctcagagcgtggtcagggcaggcctttctaaggaagtgacagggacaggggcagaaagggctgcagacaccaaaggggcccagcctggaagtgtgagtgtgaattggtgggaagccttgcttttcaggccttctctcatatgtgccttccccccagctttcgtgccttttccagctcaaaatgctcctccagcctgcaggcaaccgcagcccccgctccgtcccagggactctcatcttagctccactgttctgagataagcctgaggctcctgggccaatcctgcccccaggggctcattcctcaaattcaggacacagctgccagggaaggaatcaggctcaaaagactagagacttagagatagcccagggtttctttgcctcattttctttcctctttttttttttggttgttgttgttttgagacagagtcttattctgtcacccatgttggagtgcagtggcgcgatctcggctcactgcaacctccacctctcagattcaagctattcttctgcctcagcctcccgagtagctgagctaacaggcacccgccactgcacccggctaatttttgtatttttagtagagatggggtttc[137 bp omitted]ggacctctggcgcccctgctcaggactcagctgcctgggtctccctggggctgtcaagagctgccccagcgttcccctgcctctgctgtccccctcgaggctcccagcctccgctgaggttctcctgaggtccaaaggccaaaacaagtccaggcttcttcctaggtccttgtgaattctctgagcaccagggccagaagaggcctgtccccagcctccttcccccctcccatcttccctgcagccccttcccactgtgagctaggcaggaccagggctggaccgcaccagaaagcccagctccacttgtaaacgacagcccccacagggacacagggagacaccatccaaggggaggaggataagcccgcagggtggcccaccaatccaaggccacctggtgaaaggtaaacgcacgctgtaaacactcaaatgtctcagaaggacacccatcccttcctcctccccagagaccctttgtgatcgagcctctgtcccaattgtcccagaaaatagtgggtgctgtggctcatgtctgaaccccagcattttgggaggccaaggtgggaggattctttgaggccaggagttcaaggctgcagtgaggtgtgattgcaccactgcactccagcctggatgacagagggagatgctgactctaaaaaataaaaatgagggctgggcatggtggctcacgcctgtaatctcagcactttggaggctgaggctggaggatcacttgaagtcaggagttaaagaccggcctggccaacgtggtgaaaccccatcttttttacgttgttgtttcttttttgaaatgttgtctctcactgttgcccaggttgaagtgcaggggggtgatcttggctcactgcaacctccgtctcccgggttcaagcaattctctgcttcagcctcccgagtaactgggattataggcgcctatcaccacatccagctaatttttgtattcttagtagagatggggtttcaccatcttggccaggctggtcttgaactcctgacctcgtgatccactcgccttggcctcccaaaatgctgggattacaggcgtgagccaccgtgcctggccgatgaaaccccatctctactaaaaatacaaaaattatctgggcatggtggcagatgcctgtaatcccagctactctggaggctgaggcaggagactcacttgaacccaggaggcagacgttgaagtgagtcgagattgtgccactgcacttcagccagggcgacaaagtgagacttggtctaaaaataaaataaaataaaataaaaaatgaaaatgaggccaggtgctgaggttcacacctgtcatcccagcacttcgagaggccaagccgagtgcatcacttgaggtcaggagttcaagatcaggctggtcaacatggagaaactccatttctactaaaaatacaaaaattagctgggtgtagtggttcaagcctgtaaccccagctactcaggaggctgaggcaagagaactgcttgagccagggcggcagaggtcacagtgagccgagatcacagcgttgcactccagcctgggcgacagagcaagactctgacttcaaaaaaataaaataataaaaaataagtccgggcgccgtggctcacgcctgtaatcctagaactttgggagcccgaggcgggcggatcacgaggtcaggagatagagaccatcctggctaacacggtaaaaccctgtttctactaaaaatacaaaaaattagccgggcgtggtggcgggcacctggagtcccagctactcgggaggttgaggcaggagaatggcgtgaacccgggaggcggagcttgcagtgagctgagatggcgccactgcactccagcctgggtgaaaatgcgagactctgtctcaaaaacaaataaaaataaaaataaaaataaaaataaataaataaaaaaaaatgaaaaaaatcatacattgaaaatggggggagccactagtccctcttccccttcatggtctgccccagccatgctggcctggccaggagtgctgctgcctcagggcctttgcaggtactatggctcctgcctgcagggcccttccccatatggccccctggcttccttctccagcatcctctggctctacaggagggccacaacatccaagagcttctgctaaccaccccagctaaatcccaaccacatacatacacctctaccccattacctctatcccatcaccctgtttatttccactgcaatacttaccactctcagattctcttttttttgagacaagagtctcactctgttacccaggctggagtgcagtgactcgatcttggcccacagcagcctccacctcccaagttcaagtgattctcctgcctcagcctgccgagtagctgggaccaaaggcgtgcaccaccatgcccagctaatttttgtattttttgtagagatgggatttcatcatgttggccaggctggtctcaaactctcaggctcaagcaatcctcccatctcggcctttcaaagtgctaagattacaggcgtgagccaccatgcctggcaattgttgggttttattctgttttgttttttgaaatgaagtttcactcttgttgcccatgctggagtgcaatggcacgatctcagctcactgcaacctctgcctcccgggttcaagcgattctcctgggttcaagcg[133 bp omitted]cggccccccaaagtggtgggattacaggggtgagccaccatgcctgcccaattgttgttttttttttttttagttttatttatgtttatgggaaatacatctgcaagatgtggtggttactctttttttttttttga[134 bp omitted]cacgcctggctaattttttaaatttttagtagagatggggtttcact[140 bp omitted]ccaggctatagtgcagtggtgcaatctcagctcactgcaacctccgccttctggtttcaagtgattctcctgcctcagcctcccaagtctctgggattacaggcccctgccaccataaccagctaattttttttgtatttttagtagagatggggtttcaccatgttcatcaggctggtctcgaactgctgacctcgtgatccacccatctcagcctcccaaagtgctgggattgcaggcatgagccactgctcctggccaatggttactcttatgtgtcaccttgactgggctaccatatatatagctggcacaacatcatttctgagtatttctgtaagaatgtttccgaagagattaacatttgaatcagtggagtggctatacccagttaattttcaatttttttgtagagatgaggtcatgctatgttgcccaggctggtctccaactcttggcctcaagcaatcctcccacctcagtcttctaaagtgctgggattacagacatgagccaccatgcccggctaatttttgtatttttttttttttttgagacgaagtttcgctcttgttgcccaggctggagcacaatggtgcgatctcagctcactgcaacctccacctcccgggtacaagcaatcctcctgcctcagcctcccgcgtaccttggattacaggtgactgccaccacccctggctaatttttgtatatttagtagagacggggtttcatcatg[139 bp omitted]gggccccaggagctgacctgccgtctccatgctcagtcccctcttgacggacatgtagggtgtttctggctttggctgcaacaataatggcacatgagacgtttcacactgatggataggaccctgcagggaggattcctggaagaggaggtcccatgagaaggtccatgctgctgtgttcagaaagcaatcctgggtctccccctgagaaaaccccccacagagggaccgagatagatgatgtgggagaacaaggtactgggtgactttttttttttttttttttgagtaggagtctcactctgtcatccaggctggagtgcagtgatgtaatcttagtttactgcaaactccgcctcccgagtccaagcaattctcctgcctcagcctcccgagtagctgggattacaggtgcccgccaccacgcccagctaatttttgtatttttaat[132 bp omitted]gtagagacagggtttcaccatgttgggcaggctggtctagaactcctgacctccagtgatgtggctctcttggcctcccaaagtg[160 bp omitted]taaataagctttgtgattaaatactaatatttatacttttcagcatatacttacaagaatgggactgggcgcggtggctcatacctgtacttccagcactttgagaggccgaggcgggcagatcacgaggtcaagagttcgagaccatcctggtcaagatcgtaaaaccccatctctactaaaaatacaaaaactagctgggcgtggtggtgcgcacctgtagacccagctgctcaggaggctgaggcaggataatcgcctgaacccgggaggcggaggttgcagtgagccgagattgtgccaatgcactctagcctgggcgacagaacgagactccgtctcaaaaaaataatggaaaacagggatttccatagatatttgcacacctatgtcagtagtaccttgattcccaacagccacaaggtagcaacagtcccagtggctatggacagatgactgggtgaacacagcatggcctatacacacgctggaataggaggcagccatgaaaaggagcgaggccgggcatggtggctcacacttgtaatcccagcactttgggagaccgaggcaggtggatcacgaggtcaggagattgagaccatcctggctaacacggtgaaaccccatctctaccaaaaatacaaaaaattagccaggcgtggtggcgggcgcctgtagtcccacctactggggaggctgaggcaggagaatggtgtgaacccgggaggcggagcttgcagtgaaccgatatcgcgccaccacactccagcctgggagacagagcgagactccgtctcaaaaaaaaatatataatataatataaaaaaagaaaaaagaaaaaaagaaaaggagcgaggctctgactcaggccacaacgcgcggatgcactttgaggacgttacactcagcgggaggcgccagacacaaaaggacacgtcttgtgtgatccactcctaggaggtccctcgagtcctcagattcacagagacacaaagtaggatggaggccgccaggagctggggaggggaatggggagtgagcgtttcatggggccaagtttcagtttgcaaagatcagaaagttctggaggtgatggtcgcacaaccgtgtgaa[224 bp omitted]gagg[138 bp omitted]ctttatattatgcgtattttaccacaaccaaataaatcaatgttcataaaaccacggagttagacgagctgtttggttagcgccagcttcgcaggcagaggcctcaggggtccgctggggacccacactcagaggaatctaggcatgatataatgctctgtggttgctgtctcaaaattcctaaaaattggctgggtgcggtggctcactcctgtaatcccatcactttgggaggcccaggcgggcggatcagctgaggtcaggagttcgagaccagcctgaccaacatggtgaaaccttgtctctactgaaaaaacaaaaattagctgggcgtggtggcgcatgcctgtagacccagctacttgggaacctgaggcaggagaattgcttgaactcaggaggcggaggttgcagtaagctgagatcatgtcactacactccagcctgggcgagagagcaagactccgtctctttaaaaa[133 bp omitted]accccgtctctactaaaaacacaaaatcagccgggcgtggaggcacatgcctgtaatcgcagctacttgggaggctgaggcaggagaatcgcttgaacccaggaggcagaggttgtcgtgactcgagatagcaccattgtattccgactgggcaacaagagcaaaaaaactgtcttagaaaaaaaaaaattctaaacatttttaaacaaggggccctgtattgtcattctgagcttggcctcaaagattctgtagccaggcttcttttggggaaaggaccgggaggcctccttccagggtcaggggcgttaagcgctgcggagggatacccctcccagaggggagagagtggaacccgctcaggaagtgggttcctgacatgagaaggaaggaagttggcgggggcatcttaaaatagcatcacccaaccacgcggtcagaggtgcggggagggagcagggccagggccggggaccctcccagcgaccttccctgcaggcacccagccccgtcccctcgacacaccagacccagcaccctctgctcccaccagcccaccaggaattgggttatttaagttatttatttatttccttattttctttttcttttgagatagagtctcactttgtcacccaggctggagtgcagtggcgtgatctcggctcactgcaacctccaccgcctgggatcacgcgactcttctgccacagccttctgagtagctgggattacaggcgcccgccaccaagcctggctaatttttgtatttttagtagatacagggtttcacca[140 bp omitted]gcccaggctggggtgcagaggcacaatctcggctcactgcaacctccgcctcccaggttcaagcgattcttctgcctcagcctcccaagtagctgggattacaggtgcccgccaaccacacctggctaatttttgtatttttagtagagacaggatttca[131 bp omitted]gattggatttgggcgcaccctcaggacgtcatttgaacctaataatctctttaaaaagtcctgtctcggcgggggccaagcacagtggctcaagcttgtaatccaaatactttgagaggccaaggcaggaggatcactggtgcccaggagtttgagactagcgtgggcaacacagcaagaccccatctctacaaaaaaaaaaaaaaatatttggttagccaggtgtcggggcacatgcctgtggtctgagctactccggagcccaatgtgggaggatcccctgagcccaggagtttgaggctgtggtgagccgtgatcagctcccactgcactccagcctgggccacagagagagacttcctatctccacgccaagtgccttaggtcacgcctataatcccagcagtttggcaggcagagtgggaggat[215 bp omitted]gaggcaggagaatggcgtgaacccgggaggtggagcttgcagtgagctgagatcacgcctctgcactccagcctggaccacagagcgagactctgtctcaaaaaaataaaaaaaaaatagccgggggtggtgtcgggaagctgaggcaggagaatggcgtgaacgcaggaggcggagcttgcagtgagccaagatcatgccactgcactcctaggcgacagagcgagactccatctcaaaaaaaaaaaaaaaaaaaaaaaaaaaaaaaaagaccagcctgggcaactaagagagacctctgtctctgcaaaaaaaaaaaaaaaattttttttttgagacggagtctggcactgtcacccaggctggaatgcattggcgtgatctcagggttcacgccattctcctgcctcagccccccggatagctggattacaggcgcccaccaccacacccggc[180 bp omitted]tccgcactgctgatgagggagtgtgattgttctctgttaccagcactgtctcccgcccaccggagccgagtgtggtgggtgtggaccttctgggaaagggtgtaaacacgtgcttagatccggccggaagccccgtgaccggggtgcagctgcctttggtcagtaggtggcaaccgtgtccgcttgattttgggagggtccgagaggctggtgcagggctcccaggagaggcgggggcgatcccacttgccttgccaggataacagcaacaagggctgcccacgtgcatgctgggcaatagggataccgcagagaatgaaagtccagccctagcagggcagcaagacctcgactctacaaaaatttcaaccacaacaaaaattagctgggcgtgacggaacacatctgtggtcccagctacatgggaggctgaggtgggaggatcgcttgagcccgggtggcaaaggccacagtgagctatgactgcacaactgcactccagcctgggtgacagaggcagatcttgtctcaaaaaaaaaaaaaaaaacaaaaaacaaaacaaaaacaccaaggccaggcacggtggctcatgcctgtaatcctagcactttaggtggctgaggcgggaggatcacctgagatcaggagttccagaccagcctggccatcacagcgaactcccatctctactaaaaatccaaaaattagccaggtgtggtggcaggcacctgtaattgcaactactcaggaggctgaggcacaagaatcgcttgaacccgggaggcgaaggttgcagtgaaccgagatgtcactgcactccagcctgggggacagagtgagactccatctcaaaaacaaaacaaaaaacaccaaaacgtcctgtcctggtggaggtgaaataaatgagacatccttggccgggcgctgtggctcacgcctgtaattccaacaatttgggaggccaggcgggtggatcatgaggtgagaccgagaccatcctggctaacatggtgaaaccccgtctatactaaaaatacaaaagttagctaggcgtggtggcaggcatctgtaatcccagctacttgggaggctgaggcatgagaatcgcttgaacccgggaagcacaggtagcagtgagctgagatcgtgccactgcactccagcctgggagacagagcgagactccgtctcgaaaaaatatatgtatagccaggcgtggtggctcacgcctgtaattccagcactttgggaggccgaggcgggcggatcgctaggtcaggagatcaagaccatcctggctaatgtggtgaaaccccatctctactaaaactataaaacaattagccgggcgtggtggcgggcacctgcagtcccagctactcaggaggctgaggcaggagaatcgcttgaacctgggaggcggaggttgcactgagccaagattatgccactgcactccagcctgggtgacagagcgagagtccgtctcaaaacaaacaaacaaacaaatcagaaagttaatgggatgctgacgcaaagaaacaagctgaacaaggtggtgacagggaagttgatactgattttggcctcagccatgtggaaacagacagagggtcttgcggggaactcctctccttttttggacgcattcctgttttgttttgttttgttttgtttttttaactttcttaatttttttcagttttcgtcacactttgtctaatactatttcttttttgtttttgagacagagtttcgctcttgttgcccaggctggagtacagtggcacaatctcagctcactgcatcctctgcctcccaggttcaagtgattctcctgcctcagcctcccgagtagctgggactacaggtgcccgccaccacgcccggctaattttgtatttttagtagagacagg[131 bp omitted]attgtttcttagccaggccctgtggctcatgcctataatcttaggactttgattttttgtttttgtttttgtttttgagacggagtttccctcttgttgcccaggctggagtgcaatggtgcaatcttggctcactgcaacctctgcctcctgggttcaagcgattctcctgcctcagcctcctgagtagctgggactacaggcatgcgccaccacacctggctaatttttcgtatttctagtagagacggggtttcaccatgttagtcatgttggtctcgaactcttgacctcaggtgatccacccgcctcagccttccgaagtgttggcattacaggcgtgagccactgtgctggctttttttttttttttttctgcgacggagtctcgctctgtcacccaggctggagtgcagtggcgccatctccgctcagtgcaagctccgcctcccgggttcacgccattctcctgcctcagcctcccgagtagctggaactacaggcgcccgccaccacgcccggctaatctttttattttttttagtagagatggggtttcagcgtgttagccaggatggtctcaatctcctgacctcatgatccacccacctcggcctctgtacttttttcctattggctggggtcgggtcacacaatctaaactaactttggttggctaaacatttgattttttttagatagggtgggtatgtaaaagaaaggggaggccggg[175 bp omitted]gaggcaggagaatggcgtgaatccgggag[132 bp omitted]tagaaagttagtctttttttaaaataaggaaaggaatgtaagctgatgctgataacgcttggtattgaggcgtgtctaggcatttaacaaaggcaaaaaggaaaaagaaaaagaagggaaaggaggggtactatgaattaaagaataaatgattgatcagattattt[150 bp omitted]tttttagagtctcgctctgtcacacaggctggagtgcagtggcgtgatctcagctcaccgcaacctccacctcccgggttcaagctattctcctgcctcagcctcctgagtagctgggattacaggcgtgcgccaccacatccggctaattcttgtatatttagtagagacggggtttcaccatgttggtcaggctggtctcagactcctgaccttgtgatccacccacctcggcctcccaaagcgctgggattacagctgtgagccaccatgcctggcctattttttttttccttttttttttttagacacagtctccatctgtcacccaggctggtgtgcagtggcgcaatctcagctcactgcaagctccacctcctgggttcacgccattcttctgcctcagcctctcgagtagctgggacttcaggcgccc[186 bp omitted]aggctggagtgcagtaatgctgatcaaagcccactgcagtcttgacctcttgggttcaagtgatcctgccacctcagcctcccaagtagctgggaccacaggcacacaccacacctgggtaatttaaaatttttgtgtagagacaaggtctcactatgttgcccaggctggtctcaaactcctgggctcaagcgatccttccaccttggactctcaaagtgctgggattacaggcgtgagcccccgagcttggtcctggtcatttcttgactgcctgtcacttggggccacccagcccgccagtgtctgacttaggcttctggctgattctctgcggccactaagctcacaattggggaaccgactccatgattttgcaacatttcgatgccggaccctgacgcattactgtgagtcgggagggtcacgttccgtttgttttttgagacggtctggctgtcacccaggctggagtgaagtggcattggtgtgatctcagctcactgcaacctctgcctcctgggctcaagccatccttctgccgcagcctcccggcatgtagctgagactacaggcgccaccattcccagctatgttgtttttttttttttaaagaaagagacaaggtctcgctgtgttgcccagggcaatttcaaaattcctagactcaagcaatccctccgcctcggcctcccaaagtcctgggattacactgggattacaggtgtgagccagcacaccggctgtggg[136 bp omitted]ccccgtctctactaaaaatacaaaaaaatttgcggggcgtggtggtgggcgcctgtagtcccagctactcgggaggctgaggcaggagaatggc[136 bp omitted]agttctggataaagaacaatgtcaattaaaaaaggggtcccatcagtagaggctgaaatcatgactgaaactagcttaaagcccaaagcaaaacaaaaacccgaaagaaggccaggcatggtggctcgcactatcccagcattttgggaggctgaggcaggtagatcaccagaggtcaggagtttgagaccagcctggccaacatggtgtactaaaaaatacaaaaattagccagctggagcgcagtggcgcaatcatagctcacttcagccttgaccttctggactccagtgatcctcccacctcggcctcctgagtagctgtcccagctgtcccacttactcagtgcccctccggacccagcaattctttttttttttttttttgcagagatggcagcatgtctcaaactcctggcctcaggcaaacctcatgtgtcagcctcccaaagtgctggaattacaggcacgagccaccatgcctggcctagattcatttttttagatgcagagaatctgggctttggatttaatgacttaccaaataaaggctgtcttttttttttttaaaacaaatcagcaaaacaggggctcttggctagtttgcatgaggcatccagggatggagagatgtgtatttaagctaaaaaaagaaaaagtgaaactcacagcagtctgagtttttattcagaaaaggaaaaaagaaagcaactgagagcgaaatagtttcctggaatgctgtttttttttttttttttttttttttttttttttgagatggagtctcactctgtcgcccaggcaacagagtgcaatggtgcgatctcagctcatcgcaaccttcgtctcccgggttcaagtgattctcctgcctcagccttcccagcagctgggattaaaggcccctgccaccatgcctggctaatttttgtatttttagtggagatggggtttcgccatgttggccaggctggtctcgaacccctgacctcaggtgatccacccaccttggcctctcaaagtgctgggagtacaggcatgagccaccgcatccgaccttgaaatgcactttctttgaaacacgtcctcccctttctcaccataaactccctcacactctgcaggtttacctaactgtatgcatctaattatgtgattacctaaaagttccaggaacaggctgggcacggtggctcacgcctgtaatctcagcactttgggaggccgaggcgggcagatcacctgaagtcaggagtttgagaccagcctgaccaacatggagaaaccccatctctattaaaaatacaaaattagccaggtgtggtggcgtgtgcctgtaatcccagctactcgggaggctgaggcaggagaatcacttgaatctgggaggtggaggttgcggtgagctgagatcgtgctgctgcactccagcctcggtgacaagagcgagactgtctcgaaaaaaaagaaaaaagaaagaacgttttagagctaatctggagacaggccaagcacggagacccacctgcaaaatcccagagatttcctcaaggtggtctgcaacccggcccttattaggatgaggccagcctgcgcttttaagccaccaaaattcatgaacacacagagcttataatcagcacctcccctgcacacccaccattcccagttccccttttttagcccctcaccccagcctcaagtttgaaggggtttctggaggcctaaaccagctgcctccctgctgcgaactctgaaaggaagtcaccttcctttcactgcactttttcctccttactggtttgtcaagactctggcatcggagcctgagctggttacagccaggcactgtcaagctgttgggggaggggatgacaaattccctcccgttgagaaccacttggttaaacctgtccaactggaaggagtaacaaattgctcataaaatatgcatgttttggtgaaaccccttctctactaaaagtacaaaaactagccagaaatcgcttgaacccaggaggtggaggttgcagtgagcctagcactgcactccagcctgggtgacagactgaggctacgtctcaaaaaaaaaaaaaaaaatgtgcttgtttggcccaggagaggcaagaggtcttcttcacctacgttactggtgagaaaactcaaacctgagggcggcccacgccggagtgcagtaacaggcagaactggaacctggccccatcccggactcaggggacgggtgtcatataccccctctgcctcatccttcccactctgctaaccttccaaagatcccccgggttccgagttttccctggccgcttgatgggattcgaacctgcaaactcagcgctcgcccagcgcagcggccccgcctctcctcccctcccgccgcccggaggtcatgtgagcgcagtgccggagcggggcggggcgaggcggcggcgcgcagtgcctactagcaattgtagtccttgccccaccttggcctggcgaagatcccgcccctggaactacgctcccgtcgtgctccgcggctccaggcggagacgaggcggggtgaggtgggttgggccgggccggttgctaagacttggcgaagcgctgcgctcgcgcccggatccctcaggtaagcgcgcggccccgaggtctcgggttctccaggctcagacttccccagagggggagtaggggctgacatggggggtctcggcggtgaggggcgccggccgtttgtggggagaaaacggggggcccaggccagcctcgcgcgcgtctcgggcgggccggtgggcgacgcggggaggcggcgcgaatgcgcgtgcgcgcgcgcgcgcggcgctggcctgggggaagcctcaggaccgcgctcccccgggcctagcgcctttctgcgcgtgtgcgcccttatggtcggtgcgggagaccccgtatcctccagctgcttccggtggcccttcctcaggtcatgtcccgcagtcccctgcctctgaaccgcgctctcgcgagtttccgtagccttcgcgtccttcctccccagctctgattcgcctttatgtggagattcccctaggccttggtacatccccagaattgaccatcgttcctcatcgttacctagagtatgagtttttcaggtttttgtatcacaggcccccagttatctcccacacactaccccgaggaccgaggttccccgctgtcttgcagagaaggcctccttgtagggtggccagaaacagaggatcgactccgtggaaacaaggacggctgggtgcagttcctcaccctataaccccagcactttgggaggccaaggcgagtggatcacctgaggtccggagttcgagaccagcctgtctaacatggtgaaactccatctctgccaaaaatacaaaaattagctgggcgtggtgtcacgcgcctgtaaaaccagctactggggaggccaaggcaggagaatcgcttggacttgggaggtggaggttgcagtgagccaagatggcaccattgtactccaggctgagcaagctagcaagactcactctccaaaaaaaagaaaaaaagatttttttttaataagccaggcatggtgacacatgtctgtggtcccagctacttgggaggctgaggcaggaggattgcttgagccccggaggttgaggctgcagtgaactgtgatggcactactgcattccagcctgggcaacagagcgagaccctgtctctaaataaataaataaaatacatacgtgtagcgccggccgtggtggctcacgcctgtaatcctagcactttgggaggccaaggcgggtggatcacgagatcaggagatcaagaccatcctggctaacacggtgaaaccctgtctctactaaaaataaaaaaaagccaggcatggtggtggacgcctgtggtcccggctactcccaaaggaggctgaggcaggaaaatggtgtgaactcaggaggcagagcttgcagtgagccaggatcgtgccactgcactccagcctgggcgacagagtgagactccgtctcaaaaaaaaaaaaaaat[132 bp omitted]aatatggtgaaatcccacctctactaaaaatataaaaaattagccaggcatagtggtgcacatctgttgtcccagctgcttgggaggctaaggcaggagaattgcttgaaccagggaggcagaggttgcagtgagccaggatcgcgccactgccctccagcctgggggacagagtgagactgtcccaaaaaaaaaaaagcccccacgcagactattggtgtgccctggaactgagcattagctgttccctctccgagttctctcccctacttccccagccttccaggctgggctgtgggtcactgcctccgaggagccctcctggattctgctgaagatggtcaggcccctccatccccccattttctcttatgtacctgacagccctgccttaaaaaaaaaaaaaaggtagagcaggaattcccatttcacaggggtggaagccgaggcttggaggagtcaggactggtgcctgagttctcgcagtcaggaattgaccgcgctgggctgaacgcctctagggcaggttggggactgggtgtgttttctgggtggacatacccaggtcccggcgcggaccttggcctcctcatctgtgggcttagataaaggcctcccagcctcctgttcaccagggttgtcaccacgcagggtctgactcacctgcctggagctatgccggttcccagcccaggctggcggccgtgttctgctgggacctgggacctgggctgcctgccctcctgaggggtcccagtggtcggtcgcctgccttctgggtgggtgtggtagagggagggtcaggtggccccctgctgttggggggcagtcgctgtgggagtgagtcgtccccccgggccatagcaggtaggtaggaggtgctctggcagttgaggccgccctggcctgggacagtcaatcagcctgaacactgtgcctgttccgggattttgacctgccctccaagggcgcggcgggcccagcctgcagtgtcccggcagctgcctcctctctgggtcgtttgtttttcatcagacagaggttgtactcttggagggacaagcgaggctgtgtttgtcttttaccctggagacagtggagtgtttgtggcctagcagggccgtgcgggcctctcggtcctggtcgcgcgtggtgtgcgttttgggagggcccagcgagtcggctgctatgggccccacctggcacggggcctcgggcagcggcagcacctggcgctgcctccgcgcttcctgctcccggctcccactgcatctccggttctgtgctttgttgaacgcgtgagcttcgggcagcgctggggccgcttcagcgtgacctccaaggccactggcctggagttccactggctgctggtcccccatctgtggggcgccccggcggctgaggcgtggaccaggcagtgcatgtcgaggagtagcacccacagctgcgcggctgcgaaatgatccagagacacatccctgtctgcgggaggagccgtccataccagcggggatgtgtagtccaggctggcagttcaggatcacccggctggagtcattttaagatcatctgcggcttagccccagcaccatctgaggcagtactgtctgctagaaataactgtgagcacacaggtagtaaggtttttaggattttattattatttatttatttgaaaaaaggaacagggtctctctatcttgcccacgttggtctcaaactcctgtgcttaagtgatcctctcgccttggtctcctgagtagctgggactacatgtgcacaccaccgtgcccaactaatttatacttttaagcaatgtgggctgggcacggtggctcacacctgtaatcccagcactttgggaggctgaggcaggtggatcacctgaggtcaggagttccaagaccagcctggccaacatggtggaaccccgtctctactgaaaatacaaaaattagccgggcgtggtggcatgtgcctgtattcccagctactaggggggctgaggcaggagaatcgcttgaacctgggaagtggaggttgcagtgagctgagatcatgccactgcactccagcctgggcaacagagtgagactctgtctgaaaaaaaaaaaaatgtgggctgggcatggtggcttacgcctgtaatccaacctcaggcctgcggtgcgagtctgtgggggcagatgcaggtgggggaaggctggccagctgagactgtggtttgggggtgttcaggtggggtggatgccagagatgtgggagccagaggcgctgtcccccagggccctgtgagcagtccctgcaggctggctgtccccacgcctgcctctctgctgtgctgtctgcccgcctagggcaggctcccttctaatgggcggatcccgagagctgggggccccaccagcccttcctctccagtggagtggccctactgcctcatgtccacctgtgccagcagcagggatggtaatggctctactatctcctgtcctcacctgtgccagcagcagggatggtaacggctttactgcctcccgtcctcacctgtgccagtggctgggatgtcttcacctgtgccagcagcagggatgtcctcacctgtgccagcggcagggatggtaacagtgctggtgatgtcaggccgggaggttctcacccgagagccgccttggcacactgcccggcagtcagggatgttagcaggagccccgggagtgatcccagctcttcccgcagccccactccagccagggcctcctctgtgactgagtaagcagggacaccccagtggctgcctgctccacccgacagccagggcccaccacagctgcaggaatgtggtcaagggatgggaagtcgggcccaccaggggaggggctgcgctccggggcttacgtttcgtggcttgtcttctgaggtctctcttttcctagcccttggccgactagggggcgagtgtttacagaaaccactggaggtgggtgttccgtgtcagtgccaggctgtgtgctgttctgggagggggccccgtgtcccccacacttggcatgcttgctttctgtcactgcatagcagactccgtgcatctgtgggcttaatacaacacccgccagctcccggttctgtgggtcggggcctgaatgtgacatggctggctcctctctgcggggtctcaccgggctggaacccaggtgtcagccagggctgtgttgtcatctggaggctcaacgggggtggcatctgcttgcaactcacgcaggcgttggcggaattcagcagcttgcggccgggggaccaagggtcctgctcagttcctggccacatggcccttctgtctggaagccaggcgccgcctgtccccgcttctgcttccaggctctggcttctggagatgcagagatcacatcagtggttgcctgggttgctgtgtgtgttgtagggtggtgagacaagttttctcttaggggtgatggaatgttctggaattttatagtggtgatggttgcacaactccaagtgtc[141 bp omitted]cccaggttcaagcaattctcttgcctcagcttcctgagtagctgggattacaggtgcgtggcaccatgcccagctaatttttgtatttttagtagagatggggtttcaccatgttggtcaggctggtctcgatctcgtggcctcatgatctgcccgcctcagcctcccaaagtgctgggattacaggcttaagccaccacgcctggcttttttgttgttttttgacagtctcgcgctgttaccaggctggagtgcagtggcgcgatctcggctcaatgtaacctgcgcctcccaggttcaaccttctgggttctcctgcaagcctcagc[131 bp omitted]ggcctcccaaagtgctaggattacaggcgtgagccaccgtgcccgggttttcattttttttttgagatggcatcttgctctgtcagccaggctggggtacagtggcacgattgtagctcactgcagccttgaatttccggcctcaagtgctcctcctgtttcagcttctcgagtagctgaaaccaccggtgtgtgccaccacgcccagctaattttttgatatttagtagaaatggggtgttgttatgttgcctaggctggtcttaaactcctgggctcaagtgatccccccacctcggcctcccatagtgctgggattacaggcgtgagccgctggtacctagccatgaattgtgcttttgaaaatgacctgtcttggctgggcgcagtgactcacacctgtaatcccaccaccaggttgaagcgggtggatcacgtgaggttaggagttcgagaccagcctgaacgacgtggtgaaatcccatctctactaaaaatacacaaaaattagtcgggcgtggtggcgcatgcctgtaatcccagttactctggaggctgaggcatgagaatagcttgaacccgggaggcggaggttgcagtgagctgagatcatgccactgtactccagcctgggcgacagcgagactccgtctcagaagtaaaaaaataaaataaaaaaaaaagaaaatgatctgtcttctggtaggtgaattatatcttcgtttttaaaaaccaatggctgtttaaactctgtgcacaccaggggttagcaggacatgagggagtgtagctctgatgcggtgacctgggccggagccctcggactagcctcagctttggtggcagcacgccctgccttgtggagccacggcctcccgggacggactccccggctctcccccagccgcccgcagccgccggatgatcctctgctcccgtctctgtctcccacagtcggcctcgctgaggatggagcccgccccgggcctcgtggagcagcccaagtgcttggaggccgggagcccggagcctgagccggcgccgtggcaggccctccctgtcctgtccgagaagcagtcaggggacgtggagctggtgctggcctacgccgcgcccgtcctggacaagcgccagacctcacgcctcctgaaggaggtgtcggccctgcacccgctccccgcccagcctcacctcaagcgggtgcggcccagccgcgatgccggcagcccccacgccctggagatgctgctttgcctggctgggccggcctcgggcccgcgctcgctggctgagctcctgccacggccggctgtggacccccgcggcctggggcaacccttcctggtgcccgtgcccgcccggccgcctctgaccaggggccagttcgaggaggcccgggcccactggcccacgtccttccacgaggacaagcaggtgaccagcgccctggctgggcggctcttctccacgcaggagcgcgccgccatgcagagccacatggagcgggcggtgtgggcggcccggcgggcagcagcgcggggcttgcgggccgtgggggccgtggtagtggacccggcctcggaccgcgtgctggccaccggccacgactgcagctgcgcggacaaccccctcctgcacgccgtcatggtgtgcgtggacctcgtggcgcgcggccagggccgcggcacctacgacttcagacccttccccgcctgctccttcgccccggccgctgccccccaggccgtccgcgcaggcgccgtgcgtaaactggacgcagacgaggacggcctcccctacctgtgcactggctacgacctgtacgtgacccgcgagccctgcgccatgtgcgccatggccctggtgcacgcacgcatcctgcgcgtcttctacggtgcgccctcgcccgacggcgccctgggcacccgcttccgcatccacgcacggcccgacctcaaccaccgcttccaggtgttccgcggggtgctggaggagcagtgccgctggctggaccccgacacgtaggcgccgccctcctgcctccggacccttcccgctcccggccgtggggcgcccctcctggacttccgggcctcgatttcttccgcacaagcctgaccgtggatttcagggacacataccgcctccagcggggagcacgggtgctgccttccgtgcggatcgagctttcctggactcggtcattggggccaccccgtgccagcggtgcccttctgcggccgcccttgctgcgtttgtgtcccctctgtctcgcgggccgggaaactgctctgatgggaaaataaacagcccaaaaccaagtgggtgtctgttaggaggtgtgtgcctttgtggccagggtcccgagtggggtggggtctgtacagggcctggtggctcagccggaggggacctgctgagccacgtgtggtcagagacctgggctgattctggggtagagcaaggcccccagctgctgcctcctttcccgcttctggagtcctgatggttccaggcgtgcctggcccaagtgtgtggacactaggcgtagtccacagggcaccgaccctaaggaagggccctgggatttcgtgtccttcacaagtggcaacaggggaccccaaagggctgatgctagtcggtcacagcacagtgaggactagagccgtttttgcagaacttggagcaggacctgtgggtccacccggcaagtgtccattgcctgaccatgtgggtgcagctttgcctccagacacgcctgctgtgagcccccagcccataggggaggggatccggcaggtgggggctctgcgtggggagctcatgcagtggacagaacaccactgctggccaggagcccgccaggcctgcagtgggggagtccgtgcctgggggtgggactgaggtgggctggagggtcccggatggggccagagccacagcgtggagtgaggaggtgggagccgcagaggcgtgcccagttgagtggtagaggcagcatttgggcctccttcatgctcaggtgctcagctccttcccctgaggggcaggaagtcagggaggagggagtgagaggtgggaggtggcaggcgggcggaggggaagatgtcctgtcccaagagccaggggtgccccaccccacggtgacatgttcctgaacgggttgtgagtggagggctcagttcctgggaactgcctcacctggactgtgggcgggaggcagctcctggccccgtgcccgccccctcgggcctgttcccctgccaggatctgggatggttcacaccccactggtctgtgatgcccagtgggcagcaggcatgcccctgctgggctggcccacctcccgatggcaggtccgcccccaggatcacggaagcagctagatccactcagtcgtgggtggatgtcaggccaggtggggctgctctggtgggtgagctcatggggttccctttcagaacggccagggtgccatgcggatgcgatggggtcttaggccctgcagcgttcaccttgtggcgcccaccccttgtgggctgaagccgggatttgggggacgcaggggcctaggacagcggggaaggggcatcctggctggggcggtgggtgggaggggctgcggccagccctgcccgttttgccagcatgggtggtgtgcactggagccgaggggagggggacctgtggggtaacacattgggtcgagtcaggcctgtggctcccgcttagcccactgctgtttccagagcacagggcacgatgaagggcttttcagccacggtgggtgggtggttagcgctctgcccagggcagctcagggttccctgactgtggttgtcttccttccaggcggctgcaggcttcagcctgcgctggttggtgaaacagagatgtcaggtgagtcctgcctgcctgggagcctccagcagcgtgggcgggagggagatgccagcagttcccacaggagccctcggtcctggccgttggcaaacagtgtcctcctggcccacctggcctctgactcctcgggtcccgtagcccagcacagctggagtcacgcctctgctgggggcaaaggacagcagagccgcctgtgtatccgctcggacgcctcactgacccgaagcacagcccagccgggtgcccctgccatcacagctgctctttccttatagcagcgggcgtgttctcatgtgccccggggtccctcacccactcatttactggcagccttccccagtggggcgtaagcccctgaggacagggcctcttgctgtctgactccccatctggccctcgcaggcgcccagggacacttcctcaggcagtgctggctgagcagaagctcctggggggctcccagtgccacgctgagtgccccaaaggctgtgttcccatcttgatccctggaacctgtgagtgggacctcatttgggaatatggccttaactccggacgtgatggagttaagataaagtactggagcagggcgag[223 bp omitted]gaggcaggagaatggtgtgaacccgggaggcggagcttgcagtgagcgagatcgggccactgcactccagcctgggtgacagagcgagactgtctcagaaaaaaaaaaaagagatggtccgggcgtggtggctcacgcctgtaatcccagcacttttgggaggccgaggtgggcagatgatgaggtcaggagtttgagaccagcctggacagcatagtgaaaccccatccctactaaaaatattagctgggcatggtggcacagcacctgtagtcccagctacttgggaggctgaggcaggagaatcgcttgaacctgggaggcggagttgtggtgagccgagatcacgccactgcactccagcctgggtgacagagtgagactggatctcaaaaaaaaaaaaaagacatggagatacaggaggagtcgtcgtggagatggaggcagaggccagagctatgcggccatgagccaagggcgctgggatcccccagaagctgcttgagagaggcaggaaggctccttccccggagcctgcagagggagcgcgttcctgagacaccttgatctcagatttctggcctccaggactgttagcagataaatatttgttgtgttctttgttttgttttgagacagggtctgggtctctcccaggctggagtgcagtggtgtgatcatagctcactgcagctttaacttcctgggttcaagcgatcctcctgcctcagcctcccgagaagctgggaccacaggcacgcaccaccacgcttggctaatttttgtagtttttgtagagttggggtctcgctaggttgccaggctgatctggaactcctgggctccagcagccctcctgcctcagcctccaaaagtgctgagatcacaggtgggagcccccacacctgggcagtttctgttgttctaagcctcccagtcggtggtggtttctcacagcagccatggggaacggaagcgtccccaggccacagcctccccgcagtgtgcggactcggcctgctgagcctgcatgttggcgtccctgcctgccggagggaatgatactaaatgcagcctgctgcagccgcacccacactaaacatggaggagggctacgaagagtagcagggccctgcatgaagggtgacacgtaaatttaaaaaacaatttcggccgggcgcggtggctcacgcctgttatcccagcactttgggaggcagaggtgggcggattatttgaggtcaggagttcaaaaccagcctggccaacatggtgaaacctcgtgtctactaaaaagaaaaatccaaaaattagccgggtgtggtggtgggcgcctgtaatcccagctacttgggaggctgaggcagaagaatcacttgagcttgggaggcagaggctgcagtgagccgagatcgcaccactgccctctagcctgggagacagcgcgagactccgtctcaaaaaaagagtcataaacttagttccttaaaacagtgaaatcagttatctgacagttctggagaccagaaacgctaacatcaagctgtaggccggttcccgccttgcccagcgtctagaggcgcccccatccctccactcagggcccctttctcccccttcacagcctcagcgcagcctcttcccgtttctctctgactcccaccctcccgtctcctctcgtgaggctgccacgaggaccctctcctgtctcagcgtcctgccctcaatcccaactgcagagtcccttctgccatgagaggcaacccagccttgggtcgaagggatgaggtggggcctccttcaagagacaaagtctggttctgtccgtgggttctctgtccctacagaaaaggagaacaacttcccgccactgcccaagttcatccctgtgaagccctgcttctaccagaacttctccgacgagatcccagtggagcaccaggtcctggtgaagaggatctaccggctgtggatgtgtgagtgcgcctgggggcaggaggcgggaagcgggaggcagggctccccgagggagggagtggcattcaggcaggggcagcccgtcgggggcccaccgtctactgaagccgtcctgggcctggtggtccctgcggtgaacgaggctggtgtccaggccccagtgtcttggcttgcacagttcatcctcgacatggggtcactgggctggggaggcggacagcgggtgccccattgctgggcccatgctttcccacggccacaccctcccgtgcctgctcatccgtcctccctctctcttcgcagtttactgcgccaccctcggcgtcaacctcattgcctgcctggcctggtggatcggcggaggctcggggaccaacttcggcctggccttcgtgtggctgctcctgttcacgccttgcggctacgtgtgctggttccggcctgtctacaaggccttccggtgagcagagctgccgggggccgtctgcacccagagggaaccagggcccactctgcaccccagtcccagcccagctgtgaggagctgtccctttctctgcccagtgtgaaagacagttcacatctgggggtggcaaactgtggcccacaagccagagccaactactgtctgttttgttttgctttctagtaattttggctgggtgcagtggctcaggcctataatcccagcactttgggaggccgaggcaggcggatcacctgaggtcaggagttcaagaccagcctggccaacatggtgaaacgctgtctctactataggtacaaaaattagccaggcgtggttgcgggcgcctataatcccagctactcaggaggctgaggcaagagaatcgcttgaacccgggaggcagaggttgcagtgagccgagatctcgacactgctctccagcctgggcgacagagtgagactccatctcaaaaaaaaaaaaaaaggaataaaatagagcctccgctctcaccatctctgactggcccgttcctctctaggcgcgtctgggagaagccagggctgtggtaaccgtcgtgttttctgtccctccccagagccgacagctcctttaatttcatggcgtttttcttcatcttcggagcccagtttgtcctgaccgtcatccaggcgattggcttctccggctggggcgcgtggtaagcctctctctgatgggcgtggtggctgtgatgtggctcagctgccaggttgtgggcctgctgggaagccaggcggccaccggagcgtgctggtccgggattgtacgcgctctcctagggaggggtctgagctcaccctggcagcgcccgcgtcctcgccagcgcccgcgtcctcgccagcacccagccatggttcgcgattgtaggcactctcctagggaggggtccgagctcgccctggcagtgcctgcgtcctcgccagcgcccagccaggcttgtctcctgagtgttgatcacacccctgacccggggtctgggagccagttcctggctgctgatgtttctgcacggatcgctgcaggaggaagacctgtacatctgtaaaaacacacatacctggtgctgttaccacacctgagaaactcacagtcactctctaaggctgccaggt[132 bp omitted]acctccacatcctgggttcaagcaattctcctgcctcagcctcccgagtagctgggactacaggcgcccgccaccacgcctggctaatttcttttgtattttagtagagacggggtttcaccgtgttgcccaggctggtatcgaactcccgagctcaggcaatccgcctttctcagcctcccaaagtgctaggattacaggtgtgagccactgcacccggccctttttttaaactattattatttttttttgagatggagtcgctctctgtcactcaggctggggtgcagtgacatgatcttggctcactgcaaccttcacctcccaggttcaagcgattctcctgcctcagcctcccgagtagctgggactacaggtgtgtgcccccacacccagcaaatttttgtatttttag[158 bp omitted]aatttgtaattctcagttgcagagagtgactgttctcgcccacgtccccgacgtgtctcccttgtccttggcacggcgggagctccccacgggtgacgctgctcacggagccgtgggtgcctttggtttcctgggctcccattagcaagctcctgttctggggttcctgccccacaagactgcggtactctcacgccagtgcacagatcagaatccagataaggtcccaggtttcctgggatggtgactcctctcccttcagggcccctcgatctgcaggcctctcccctcctgcacctgcgcctggcgccaggccctccagggtggctgggatctgtggtttgtgcacccctcggatgtgccgctgaagctggtctgtcacctgccaccccaagagcctgagtgacgttgccccagggatctgagttagagtcatagtgagcgtgtgcctgggactcccagctctgccagcctttggggtgcttccccctcctgcagaggctgtggctgcaggtcaaggcactgctcgtcatcctccgagtcctcctgagctcccagctgccagctcggctcccactggcccttccctgggctccagtgcctcctgtgagccgcctccccggtgcgtccccagctctcccaggctgagctgggtggacaggcctgtgcccgtgttgggtggtcctgagatcccggcatgaggtgagtgcccacatgtgaccctcagagacctccctgccccctcggccctcgtgcacgtgcggcagcagcgacttggctcttctcattggagcctgggtcatctcccgcaggtcacgggagaagctgagcatgcggtccctgcccgaggtggacagaaggtgaacgctcttgagaaagaaacccagcgggtcttaggagagcccggccccccttgtaatgagagaaatcaaaccacagcgcacagcgacttcatgtccaccgttggcttagtgaggccccacgctcagtgcgctgctgtggggcgagaggggacagccccgctctccctgtcctgggcggcttcaccagcgccacctccccacacactctgtgcactgctgtggggcaagaggcgacagccccgctctccctgccccgggcagcttcaccagcgtcacctccccaggggtgacgcatgcccgaggccatgagccacggcagcatctgtggtggcagaggactggaaactccagagaaatgacccccagcggggcctagctgtgtagatggtgagggtggccacatggcggcagccaggtactgaggacacggtgcagcaggggcccccggtgggccccgccaggaatcggacatcagcgggcgccgcagcctctaagcggagcatgcagcccactgacagtgtgctgggtgcctccctagacctgacacttgcatgcgggggcgtgcgatgctggccagtgggaagctgcgggggcggcggcaggagtcctcaaatgcctttgccgcttttcataaatctaaaattacatccaaacagaggtttacttttttaaaaaataaaagaggccaggcatggtggctgacgcctgtaatcccagcgctttgggaggccaaagcaggagaatcactgcttgaggccaggagttcagactggcctgggcaacatagggagaaaccatctctccagaaaaaaaaaaagaggaaggaatgacccaaagaccatgcagcctgtgatgctgtggaggctccaagcaggcgaacacaggacaggccagcatcttgcagggacgcggcggggggtaccgcgtgtgcgtgcatatcacgccccgtgcatgtgtgtgcataagctccccggacacatccgggggtgtgggtcctgcgggctgcctgtgcaccagggaggggagtcagcaggagagagactgtacgtcgtgcctgcctttaagttccctgaattttaaaccctgtggtttcatcacctgttaagacaaaaatctcaaaatgactgttttctgcctcctgggtctcaaaggcaggtgcaatgcccagaggctggtcctgcacagagggacccagggcgtgctggccttcccagtgtcccactggtggctgatctaagcagtgctttccctcgtttttttattttgagacagaatcttgctctgtcccccaggctggagagcaacggcacgatctcggctcactgcagcctcccgcttc[133 bp omitted]tcggcctcccaaagtgctgggacgacaggcgtaagcctctgcgcccggcctcctcattgtttctaatggtccctcagtgcccaccgggtgatggtggcagattttccatccgcattgctcccggacatgcggatgtaggtttcagcagttcccatcattagacacagttgccgtaggctgggttcttagtagcaggctcagtggggcctttgagtctttccatggctggtgcccgccggactcactgagggaaactaatggggaagcactggtctccattccctgcacgcacagcccactgctgcgatggtgaagggataaggttgtgttcacgcgtcgaagtttgtgtccactgcacacgcggctcactgctgcgatggtggagggataaggtcgtattcacgcgttgaagttggtgcctctcagtatcgctttatgtttgttggccacttggtcgtccttgtatgagctgtccactccttgttgattggccagagctctttacatggggaggaccatgggccggaccatgggccctcatccagcaggtgtgcaggcacccacgcactctcttgtcccttgcagcggctggctgtcggcaattggattcttccagtacagcccgggcgctgccgtggtcatgctgcttccagccatcatgttctccgtgtcggctgccatgatggccatcgcgatcatgaaggtgagtcctcggctttgtgacgtccagcccttaccccttctccatgaacctcgtcacccaactgtcccaggtgggtgaacgtcgaggagccgggccctctccccacggtgtcacgcaggccgcacttcatccccagcagtgagctgggatgacagcaggaggcactgtcaccagggacactcccagggacccagcgcctgggttcctatggggccagtcctgtggccccctgggccgggagtccagactccagagggaagcaggggttgtgtgtaaaccgcagtgtttgcaggaacagctgaggccctggagctgtcctgtcagtgagggtggggccccttgcaggttcccggtcacagtttccatctgaagatagcggaagtgttgagctgggctcataacagaaactttcagttacagcaaaatgcttttttttttttttttttttttagacagagtctcgctctgtcacccaggctggagtgtagtggtgcgatctctgctcactgcaagctccgcctctggggttcatgccattctcctgcctcagcctcccgagtagctgggactacaggcgcccgctaccgcacctggctaattattttgtttttgtatttttggtagagacaggttttcaccgtgttagccaggatggtctcaatctcctgacctcgtgatcctcccgcctcggcctcccgaagtgctgggatgacaggcgtgagccaccgtgcccggcctattttttatattgtagtagagacagggtttcaccatgttgtttggactggtctcgaactccagagctcagacagtctgtctgcctcggcctcccgaagtgctgggatgacaggcgtgagtccccgtgcccggccgccatgctcattttctgtcttctgcctccctgtcctctgtccttgcaggtgcacaggatctaccgaggggctggcggaagcttccagaaggcacagacggagtggaacacgggcacttggcggaacccaccgtcgagggaggcccagtacaacaacttctcaggcaacagcctgcccgagtaccccactgtgcccagctacccgggcagtggccagtggccttagagggagcctgccctgcccccaccgcccaccacctcctccccttcattcctgctgctacccctggtcccgagggctgggagtacctggggccccatccccccagctgggatggtggaagccggtggtggccacggaccgcccccctcctgccagggccacagaacccgtgttcatctcatccgagagcggagttcctcacaagcactccccagcagcccttggcctctgccgtccacaggacgccctcttgctcccggaaacgtgtggtcacccgccgtccactgcacggctggtacggccttgtcttcaggtctcgaggcctgactccgggggacaggtggcagcaggtcggccgccctcccgtcctcccagagctgctggcgctgaggtcagagcgggtctgatggggagctccgtctcaccggccacccgccgtcaccatggcagatgcccttggccggaactaataagaggcgtcggggccagcttccggtcccctgcagtgatagagggcttggtgcctagctgagtcctcgctgtccccgccatcccctgatctgtgcggctccagcctcgccccctccccacgtgcaccatacctggggagttcctggtccagggtatcctggggccaccctccctgcctccaaaacagggatccctggcaggctgtctttccacgcccctgagttcagagtcggggacccaggccaggtcgggagcacagccgctccccaaacccagcaaaccggcagagagccggtttcccagcagccggagccctgcaggagaggcctttgtgttttgttttgttttgttttttctcttttgagacaagagtttcactctgtcgcccaggctggagtgcagtggtgtgatctcggctcactgcaacctctgcctcccgtgttcaagcagttctcctgcctcagcctcccaaatagctgggattacagttgcctgccaccacgcccagctaatttttatatttttagtacagatggggtttcaccatgttggccaggctggtctcgaactcctgacctcaagtgatccacccgccttggcctcccaaagtgctgggataataggtgtcagccaccgcgcccagcctggagtggccttttatgagaggggacccgtcaaatctgtgccttatggaggggtccggcagcggccacaattgtcttgtcccctcaccccccaactccccctggaacacctctcccaggcaagacattttcacagcaccattcacaacggttgggccaaaaagaaacttttccttcatcatttcctgcactcgctgaccacaactttggacaccccaggctgccacccctccccacccgttcacccccaggatgctgttgctgtaggacgcctgctgccctggagccctccccaggatgtgagccagtcccctcgctggtacggaatgccgctgggtgcccggaggcggccatggtgtctcgatggacggcagccaggatggagcacccatgggtctcacggccatgcttcagggtcttcaggtcctgcccccggccagtctgccaagaggcacccccttccccagcctctcgcctgcactgatgcagacaaaatctcacctggcaggcccaacccccccccacccctcccccgccgtgtgtggcccctcgccgcatcgttggggttttgttatgtgaaaatatcctggaaataaatacatgtttctgcacttagagccagggacctgccgcgtttgtgctgtgagcatgtgtggttcccccaggccgtcttctcccttgggagacccctcagcatatggcctctggcaggatgcccccctgcagcgcctcctcccacccaggccccgggtgccctgtagccaggtgtgcccagggctgaccctgccatcctggccaacgtggtgaaacccggcctctactaaaaatacaaaaattagccgggcgcggtggcgggtgcctgtagttctagctactcaggaggctgaggcaggagaattgcttgaacccgggaggcggaggttgccgtgaacccagatcgcgccactgcactccccaccggctcaaaaaaaaaggaaacttgcacagatggaaagccagtgtcactggccctacgtaaaaagcaaacatcggccagacgcagtggctcacgcctgtaatcccagcacgttgggaggccgaggtgggcggatcatctgaggtcaggggttcaagaccagtctggccaacatagtgaaactctgtctctactgaaaacacaaaaaattagctgggcgtggtggcacacgcctgtaatcccagctactcgggaggctgaggcaggagaatcgcttgaacctgggaggcagaggttgcactaagccaagattgcaccattgcactccagcctgggtgacagagtgagactctggagagaaaaaaaggggggttgtggggtgtggtggctcacacctgtaataccagcactttgggaggccgaggcaggcagatcacccaaggtcaggagttcaaaaccagcctggcccacatggtgaaaccctgtctctactagaaatacaaaaattagccaggtgtggtggcaggtgcctgtaatcccagctacttgggaggctgaggcagaagaatcagttgaacctgggaggcagaggttgctgtgagccaagataacgccactgcactgcc[148 bp omitted]cccatctccactaaaaatacaaaaaattctccgggcatgctggcgggcgcctgtattcccagctactcgggaggctgaggcaggagaatggcatcaac[143 bp omitted]aatactttgttttttgagaccgagtctcactccgtcgcccacactggagtgcaatggcgcgatctccgctcactgcaagctccgcctcccgggttcacgccattcccctgcctcagcctcccgagtagctgggactacaggcgcccgccac[174 bp omitted]gtggcatacttttttaaatgtgtgcaaaactcttgaacatctggcttcatagaggacaagagggatggctcagcagctctgtcgcaaaagggtgttttaccacaacaaagattgagggcaaatggtctatctaggatgtgagcccaggaagtaccgaaggggtgtggggatggggagtggcccatagggaggcatgaacagggaggttacagctccaggctgctggagctcagtccctctgaggatctggctcaggttgtcgtccggaggtgagggagctggggtatttatcctccaactcccctgcaaatggtatgggggctggggaggcttagctccgccctcaggtagagagtcatagatgctggtctgtgtgtgttgtgcttgtgttgcgtgtgtatcgtatgtgtgtgtgtgtatgtgcatctgtgtgtctatgagtgtctgtgctttattacagattgaattaggtcctccccaatacccatatgttcacaccctaagccccaggacctcagaatgtgactttgcttggaaataaggtcattgaggatgaaattatatagttaagatgacttcattctggagtagggtgggcactgatccagtgtgactggtgtcctttacataaaacaggaaatttgagctgggcccagtggctctcacctgtaatcccagcaatttgggaggcagaggcaggaggattgcttgagcccaggagttcaagaccagccttggcaacatagtgagaccctatatctacaaaaaaaattaaaattagccaggtatggtggcatgcgcctgtagtcccagctactcaggaggccgaggtgggaggattgcttgagaccaagagtttgaaaccagtctgggcaacatagcaagatctcatttccacaaaaaatacaaaaagtgtcagggcatggtggcacatgcgtgcattcccagctactcaggaggctgaggtgggaggattgcttgagtccaggagattgaggctgcagtgagctgttaacggcgccactgcactccagcctgggtgccagagagagaccctatctcaaaaaaaaaaaaaaaaaaaaaaagccaggtgcagtggctcacgtctgtaatcccggcactttggcacaccgaggcgggtggattatctgaggtcaggagttcaagaccagcctggccaacatggtgaaactccgtctctactaaaaatacaaaaaattagccaggcgtggtgatgcacacctgtaatcccagctacttgggaggctgaggtgggagaatcgcttgaaccgggaggtgtaggttgcagtgagccaagatcacaccactgcacttcagcctgggtgacagagcaagacaaaaaaaaaagggaaatttgggacacagacacacacaggacgaacaccatggtgaagctttcgcaagccaagaacgccggtcaccgccaagagaggcctgggacagagtccactcgggctcagaaggatccagcgtcgctcacaccttcgtctgggactcgcagccccagaaccgagagagaataaacaggtgtttgcgccgccgggtctgcggtacctgtcaaggcagccctagcaaaccgatgcgtgtttgcatgtgtgaatgcgtgtgtgcgtttacatgttcaggagtgacaggtgctgcagggtactgacggggaccgcagcctctgctgtgcgtcctaaatatcacgcccctctttctgcaaactgtcgccccagtcactgccccgtcttcccttcggaggtcgaccccgccgccctccgctcggccgccagagggcgacctcggactccagtcggacgggctctgccctggctcccgggcttcaggttctaatagaaactctcgcaggggtgggtcacgcctgtaatctcagccctttgggaggctgaggcaggagaatctgccgggaggcagaggttgcagtgagctgagagcgcaccattgcactccagcctgggcgacaagagtgaaactccttctcaaaaaaaaaaaaaaaaaaagaaaagaaaagaaaaaaaatggggagtgtccgcctctggacaaggtgcagccggcatgatgtggctcctgagtggccacgtccccttcagggtcacaggggcgatccagggaatgaggaaaggaagacggaactgcaggcatggcgggggacctggcgggcagctgggggcatcgtgtgcccccccccatggctactgcccctggtggtgagtccccggggtgggcatcactaaaagagtgactgtgatggcttcattgggctgggccctccaggctccccctccacccctgccactgagctccacgcccggacccaggcctgggggcactgcagggacggatcctcaaccctctggcttcagcttccatcccagcggggtccagctggggacttgcaccagggggcagggggctgggagagtgagggaggaagagtgagggaggggaagtgaggccgattgtcggtccctggcctcctccctctagaggacagcctgtccatgggggtccctctctgcagcccatcccccacctgtaaggcgcccactgttgccaaccccaggggctgtgtcattccgcgttgctgcccctcaccctgcctacgcctccacaaaccccactgctaaatccttcttccacatgagggagccatcgccttccaacagcaatttaggagggtgaatgtgatgtttgggatgtctcacgatttcccagcatgaacgcacaatctcaagctgtgtgtgtgtgtgtgtgtgtgtgtgtgtgtgtgagagagagagagagagagacagacagagagactcactctgtcgcccacactggagtgcagtggcacaatctcggctcactgcaacctccacctcccaggttcaagcgatcctcttgcctcagcctcccaagtagctgggattacaggtgcacgccaccaaccacacccagctaatttttatatttttagtagaaactagtttttgccatgttggccaggttggtatcgaactcctggcttcaagtgatccacccgcctcagcctcccaaagtgctgggactacaggcgtgagccacccagttgagtcatttttttcttttctttttttttttttgagacggagttttgttcttgttgcccaggctggagtgcagtggcgtgatctcggctcactacaaccaccacctcctgggttcaagcaattctcctgcctcagcctccagagtagctgggactacaggcatgtgccaccatgcccagctaacttttgtatttttagcagagacagggtttctgtttctccttgctggtcaggctggtctcaaactcccaacctcaggtgattcacccgcctcagcctcccaaagtgctgggattacaggcatgagccaccatgcctggccccccagttgagtcatttccagtcttctgagccccagaaacttgataagatgtctgttgttttatttattaattttatttttgttttatttatttatttatttatttatttatttgagatggagtcttgctctttgcccaggctggagtgtagtggtgcgatctcggttcactgcaacctctgcttcccaggttcaagagatttccctgcctcagccgcccaagtagccaggactacaggcgcccgccaccacacccagctaatttttgtgtatttttagtagagattgggtttcaccatattggccaagctggtctcaaacccctgacctcaggtgatctgcctgcctcagcctcccaaagtgctgggattacaggcatgagccatggctcccagcctcttcttttttattaaaaaaaataataatttgtttttgcttaatttatttcaccagtcatatcacaaagacatgtgttgttttaggccactgagtttggtataatttgttatgcagcagtagctgactgatacaataggtgttcctggattatcttcagaaacctgataataatatgtacactaactagggctgtatcagggtgcatggcagggtttttgaaggcattttaaagaggtttagttcctgtcctcaggagctgctgcctagtggggcagacagaccatgaatatccatcatggaaggcagaacacataagtacatggacgaaagcagttccagaggctggtgggttggattcatttggcctgatgtatcatggagtcctcccaaaagaggtgatcatctgcctgagctttgccagacctgttgggctgagagaagccagacaaggctcagatgggtggagggtcagggtgggttggaaaggaacaagtcagtatgggtgcagagggcgtcctgatggatagatggggctgcgaagtggaaccagccattgaggcagcctcgaatgctgtccccattgtggggactttgaaaagccaccctcctttgaaacacagaaggggcaaggagtaaatttatatttctttttttctttttttttgttttgagacggagtctcactctgtcacccaggctggagtgcagcggcaccatcttggctcactgcaagctctgcctcctgggttcacgccattctcctgcctc[135 bp omitted]gcctcccaaagtgctgagattacaggcatgagccaccgcgcccggccaatttatatttctggtaaggggtgggaagaaggagctttctcaggctggaggggagagaagacagatgagcacagacactcctggcagcggcatgagggccggggagcaggtgcagggcacagcggggctctgcagggcggttgtagttggtgaggaccactggagcagggccttgaagggcgtcacccctcacctggctgcctctgggccatcctccagtctgccagggactagcagaggggagaaagtgggagaggaatcattatttgatgacctcattcagccctagggatttggggtggctaaggtagaatggcagtggattatatctgacatgatgcggggtgtccgggctcagctgggcagttctgctccctgtggtgatggggggtaatcagcaatcatttagtggctttccctggccgggaatgtttgaggtagctcactcacagggctggcaggtggtgcctgctcagtggtgccatcacccaggggcttccaggtggctgcctcacaagatggcagctgggttccaagcagaaaggacgctgttgagttcttttttttttttttttttttttgagacacagtctcactctgtcacccaggctggagtgtaatggcgcagtctcggctcactgcaacctccacctcccaggttcaagtgattctactgcctcagcttcccgagtagctgggattacaggtgcccaccaccacgcccagctaattttgtatttttagtagagacagggtttcaccgtgctggctaggctggtctcaaactcctgacctcgggtgatctgcccgcctcggcctccccaagtgctgggatgacaggtgtaagcaccatgcccagcctactgtcgagctcgtaagaccctccctcagaagtctcaaggcaccacttcccctgccttctgttgctaaaacaggtcacaggagcagctacattcaggggaggggaaatgaactgtgtctttccgtgggaggagcagcaaagaatctgtgaccatcacacccagcttttgaaccacttcttctttgtgtctcagtgtttgtggcatgcagcatccctgttgcctgggtccaggatgccaccctcctactggggttgcagcaccaaggggctgggcattccatcgagctgaggggtgggggctctggatgggaggctccctggggggagctcacatcttccatgaagcatcatggtcattgttgccctgtcctgcaccctgtccactgcaggctgccctctgtggctggccttggtgacaagagatgtgggagagaccctggtcaccaccatgggaggagtccccaggcaccaggggcaaatgaacagagtgaatgccaggaggaccatttaggtgcaatatgaccaaaaataagttaagtccaagtgggctgcatcatcaacaagaacatcccccagcctccatgaaacagcccaaaacctggagcaagacggttccctgacgctgagcgatgccattcacagcagcgttcctgaataccccccatgcaggcactcacatgctcacacacacaatacacaaaccaacacacaccacacacaggcatgccaaacacaggcacacaaatgcacacccccccatagacccaccgacgaacacacacacacacacccagatgcacaggtgcgcacacacacccacgcacacaaagacccagagacagacatgtgcacacacatacatatgcacacatgtacgcagatacatatgacacaaatgcatgaacacatggaccacacataccaacatgccacctcacacagacacacctaacacacacacacccgtgcacacatgtacatggacatacacactggaaaacaacaaacacatatacaaaatgcaggccggttgcggtggctcatgcctgtaatcccaacactttgggaggccgaggcagggggatcacttgagcctgggaagtgagggctgcagtgagctatgattgaatctctgcactccagcctgggtgacagagggagaccctgtctcagaaaaacaaaacacgaaacacaaaatatgaccgggcgcagtggctcgcgcttgtaatcccagcactttgcaaggccgaggtgggtggatcacaaggtcaggagatctagaccatcctggctaacacggtgaaaccccgtttctactaaaaataccaaaaattagctgggcgtggtggtgggcgccggtagtcccaggt[139 bp omitted]cacacacaccaacatgttacatcatagacagacacacaaaacacacaaacatacacccatccatggacatacacacagacacacacaaacatcaacacacagcatcccacacagacacacaaacacacagccatgtaccctcaaaggacgctgcaggatgagccttcattctctgggacagcagagaaagtagacaaaggagagaaacttctctcagagtcacccatcctctgactggatcccgtgcccctgtgaagaggcagatcccagtgccccacacttggctctggggccacccactgccgccaggctctgtccctgcggttggtgggggtgagggcagaccctgctctgtgctgcttcctcacccaccaaaacttcctgacgtcgccctgttccgttggctgcgctgcatatgggaatgcagtgctgggcaggcccagcctcccagctgggaaggggtgtcgccactggctgcaaagacaggtcttcttttcccccaagtctgtgtttatgccctactagagactgttgggtgtaattcccagaaagttctggaatgatctaaaatgaggaaatagaaaaaagttgtagaatcgggccaggcgcagtggctcatgcctgtaaacccagcactttgggaggctgaggcaggtggatcacctgaggtcatgagttggagaccaacctggccaacatggcaacatgggcagacatcaccaattaatcatcgaatgatgtttctcctgacctccttcctcctgtgtacagggtaggcatcaccaatcaagcaatgatgttggttgactggggaacgctgctgtttgtcctgccttccttcctcttgtgcacagggcagacatcaccaatcaaccaatgatgcccacactgcttccctcccatgcacaaagcagacatcaccaatcaatcgagcagcaccaggaggaaaccaatttggcagttcaatccgtcttcaactctatccttttatagataaggttgaggcccagggacctggtcaagggcaactacagggcagatccctcctcctcttcctgggaattagctttgtctcttgttcctggagcaaattcaggaaaattgcaaggtcatgtacattttcagcccagggcatgagtcacttgatccctgctgtccagagctggacccggagatgatggccaggactgtccccttgcagggaggccactgaggctggcagggccaagactgggcagtgagccactccaggcgggaaagccctttgtcactggagctgctctgaacgctgccgccaagtcgcaggcagctgttgtcatctgctcagcgtccttccccttccccggcaactactcctcctgctgtggggaacctggcccacccgactcctgtgttctcagggcgctgcccctcgtggaacctgcccttctggtcaccaggacattgcctaaaccaggcctggccagtcatctgggaggggccaatgccagacaataagagactttcctgggattttatagcgatcctgggagagaagagctctgttttatttgggggttgctaaactaagccacagctgccaccacggacggaagaagcttggagtgaaagaatgaagccaaggcacagagacggagagacaaggagagggagagagagagggaaaggtagagacagagagagatgtggggagggagagagagacagagagatagagaggtagagatagagacagagggatatagagagggagagagagacggagacagaggatgaaagagacgagacacagttggagatagagggagagatgcagagacagagagagatagagagggagaaatagagacagacagagctaggaagggagagagagacagagagaggaagagaaagggagagacacagagacagagacagagagcttgagagacagagagagaggcagaggaagaaagaggcagaaagacaaatagagagacagagacagggagagacagagacatagacagaaagatggcgagcactccagcctgggcaatagagcaaggttccatctcaaaaaaaaagagagacatagagacagagacaggaaaagacagagagatagagacagagagagagaaaaaagagagagagagagacatgaggacaaagagaaaggtccacaggcactgagcttgagtcacccctggttgcagccatgcctgaaggcagctctgcccgaccgctgagttccacagcccagcatctgtgatgggctgcacctgtgtattagcacgttactgataaggcccagctgctttaacaaatcggcccgcctggcgtagcggctccggcacagtggacgtttacttcttgctccaggccggcgacccaggcagctccacaggtgacctgaggactcacggtccctcatctgggctccatgaccccccagggccccatgtgctcctcctcctggggttggaaggggaatggaggcccagggtggacagcaggaagaagacacgtggctggaggcacaagcccgcggcggcctcagcaacaggacccagctttccttcctgcgaggcatgagtctggcccctgcccccgggctcctgaccctccagccaacccggcctcagaatgagtggccccgagagggccccgggccacagggctgtggggacacctccagctgtaacaggcggcaggaccaggaggtgagcaaggggggaaaagcttccagaagttttcccagacgctgcgaccctgaggctgggccttcaaggatgaatggggcgagagtgggagaagggcttcctgggcagaggatgtgcggctgttgggacagtggcatctctaacaaaataccgtaggtggggcagcttagacacaacaaatttacttctcacagctttggagagcgtggaggttcaagaccaaggtgtgggcagctttggtatctgctgagggcctgtttttgttttttcgttgtttttgaggttagagtgcagtggcataatcttgactcactgcaacctctgcctcccaggttctagtgattcttctgcctcgtcctcctgagtagacaggattacaggcgcccaccaccaagactggctaatgtttgcattttttgtagagacggggtttc[145 bp omitted]cctggtcttacgcgatcctcccacctcagcctccctaactgctgggattacaagtgtgaacgtctctttatgtgagtataggaatagaacagaagggggcacttcctgcctgcctcctcccccaaacctacgctgtttgggatttactgggaggctgggagatcttctctctagaggatgggatgggcgtggacaagttgttatctttataatgttcttattagattaagacctccaaagggtgctgggcgcattggctcaggcctgtaatcccagcactttcggaggctgaggtgggtgctattgcttgagctcaggagttggagaccagcctggggaacatagcaaaaccctgtctctataaaaaattagccgggcgtagtcgggcacggtggctcacgcctgtagtcccagcactttgggaggccgaggcggggggatcacaaggtcaggagatcaagaccatcctggctaatacagtgaaaccccgtctccactaacaatacaaaaaatgagacgggcgcagtggcgggcgcctgtagtcccaactactcgggaggctgaggccaggagaatggcgtgaacccgggagatggagcttgcagtgagccgagatagtgccactgcagtctggcctaggcgaaagagcaagactccgtctcaaaaaaaaaaaaaaaaaaaaaaattaggcgggcgtggtggcgcgtgtctgtgatcccagctactggggaggcttaggtgggaagactgcttgagcctggggaggtagaggctgcggtgagccgagactgtgccactgcactctagcctgggtgacaaagtcagatcctgtctcaaaataaaaaagacccggctgggcgcggtggctcaagcctgtcatcctagcactttgggaggccaaggcaggcgcatcacctgaggtcaggagttcgagaccagcctggccaacatggtgaaaccccatctctattaaaggtacaaaaatcagctgggcatggtggcgggcgcctgtagtcccacctactcaggaggctgaggcaggagaatcccttgaacccgtgaggcggaggttgcaatgtgccgagatcatgccactgcactccagcctgggcaacagagcgaaactctgtctctaaataaataaataaataaaaaccctcaaaggggctagtctcacccccccaccagctgtccccaatgacatcctcatgattaaagctgaaatgaatcaggaacatgtggaccacatttgaagtgggttaaaaatgagaaagcaaggttggccacggtggtttacacctggaatcgcagcttttttacagttttttttttttttttgagacggagtcttgctctgtcacccgggctggagtgcagtggcacgatcctggctgactacaacctccgcctcccaggttcaagcgattctcctgcctcagcctccagactagttgggattacaggtgctcaccatcacgcccgcctaatttttgtatttttagtagagacgaggtttcgccatgttggt[133 bp omitted]gtgcagtggtgcaatcacagcccactgcagcctcgacctcctggttgaagcaatcctcctgcctcaggatcccaagtagctggggccacaggcatgcgtcaccacgtcccgctacttttattttttgtagagacagggtctctgctactcaggctggtcttgaactcctgggctcaacgaagcctcctcctccgtcagcctcacaaagtgctgggattacaggcgtgagcaaccgcgcccgccccacaccctaccttataacatcatctgaaatcattacacagggctctctcctccccctaggaccgaggactccctaggaaacgatgccaagagtctagctcactgttctattctcagagccactggcaggcacttaatacatatttgaatgaatgtgtctccttcgactttaaaaatgcccccaccgggaagtgcgtgggggatgtgggaaggccggaaaccatttctgcagctgccagtccccttccaggccctgtcatgggatggagcagggcatcactgtgcggcgccttggcctgtggatcccctccccacgtttcttgcccggtgcaggccggaaggcaggcaggtacaagcaaggagtcggctctacgcgcagagccccaggggagcggcccgtgctgggcatggcagtcccagcagtgcatttgtctagctgccggccgcgggtccggggccacttcctctctgctccttgctgatgtcacggtggatgaagacaacggggcacccacgtcaccgctgttctccccctgaacacggagcagttattctagaactgttttcccctcctcgcccaggaaagccagatggaaaaaccctcttgccctgaaccagctcattttctggccagtcgccccttccagcgcctgtcccggaaacctcgcggcctagcgcgcgcagcccgccgcctccccgcgccgcgcccgccaccgccccacgcacggaacatcccgcggcgccgcccgtccgtgacgtcaggtggcgagactgtgacgtaacacacggcggcagggcggtgccaggacgaccagccacgcgtcgccatggcaacagcgggcggggaggggcgggcggcggaaggcccgcccctagaagggtgtggaaaccgttagaccccctttcctgcccgcgcgcgccctcgcggccacgcgctttcggtgtcccccgcgggcagcggcccggcggcctcgtagcggccgcaaaacgccgtggccgtcgcgcggcgccatccgttgtcgcaaagcggcgcgagaaacgcccagccgggtgttggccccgccccgcgctgtgacgtcggcggcgcgcgcccccggcgccgtggccgcggctgcgcagtggggcgcgtatggctgccgccccccgctggcagacgctggcggcgtaaggcgcgcgggccccggagcgggcgcggcggagcgcggcgagcccggcgcctcccgtcccgaacatgcggaggccggcccaggcggcgcgggagccggagcgggggcccaagcggcaccggagccggagcgcgagggggcgcggggcccggagcgggggtccgcgctgcgctgctgaggccgggccggccgcccagacgctgcccgcgggcccggccacggcggagccaaggtaacgacgcgcgcgcccgccccggccccttcgccccctgcaccctggccctgggcgcccccagtgacccccggcgcccccgcccccacactcggtgtccactgccctcctgcgccctgccgaccccgtgctccggaccccagcgccccccaacccgtctaaccgccccgcaagctgacccccacactcagggccccaccgccgcaacaccccgttgaccctgcactcgggaccccagcgtcccccaccgccctaacccgcgctcaggacctccggacacagccccacgctgacctccacactcaggagtctgccgccccagtgaccctcacactccagaccctgcccccgccgctccagtgacccccccactctgcaccccggtgactgtcgtgctccaactctcctgccctccgctgagcctttagtccccaccccacctcccgccttcttcccccacccagtgctcaagcccaccgcccactcacccgcgtccctcacgcctccccgcgttctggtcccgaggcccctgcccacctggccccatcgcctcctcctgtcttggcctggcccctccccacgcagctgtgtccccgtcctcactttgtggtcctaaagctcttgagggggagagcagggggtggtgggggggaggaaggtggtctgatccgcagggacctgttgcggcactgcctgggaactcccggctgggctcgctgccccctcccccttccgctgtggccaccggctttgttttccggaaacgcacggatcagggagggagggtgagatgtctgagcagggcctgcggtggcctcaccgatccccgatccccgcctggctcctctctcccaactttcttaggggaagactttcccgttgaggggcgtgggggctgagaggacattcggggactgttgcgtcttgagccagaatggctttgggacagctggttcttattcctgtggcctccggatggcattgtttgcaggaagcgggccggagggttgtctgtgtaggtggagtccagcatcttctccccgttacgctccaccgtgtggcccagtgcgccggggcggtccacaaggccatgtggggctctgcctccccaccccaggacatgcaggagccttcttggtgtttcctggctcccggaggccctggtagctcgtgggtgtgggagctgagcaggaaggtacaaaggctcctgtctgggggaaaaacccagccgtcccgccacgggaaggcgctcggattagggagggggctgggcgggggttggcagctggggatggaagcaccccgggctactctgccctgcacagcccagcctagcctggggtgcctctgtgcagaggaaagactgtgtgccagggcccccaggtttgaaagggggaagttcgcggttgtcactggtactttgttttgttttcccctgtgtctccaccaaaacgaaacgctctgggctgggctgactgatgagtttcccaggcaggcagcccccgggagtgtgtgcaggtacgcgcacgcctgccttgacgtctctagggccgagagtgttttgctcagccccccacagtgagctctgagagccgctcctgcacagacgagagggaacgggagacctgcatgcaggggagccgggtctggacggggtcccaatgggagggccaggtctgggggtgagaggccaaccatgtgtcctgcaggaccgtgcagcgggcaaatggggtgagatgttggaggagctggctctgttcccttcaccccggtgggaggcgaaaccccaagtggtctgtagtgtctggatttactgtgcctgctgtgccttcggacttccttgtgtgtctaggggcttcctgtctgatttgaacctgtctagttcctctgaagaggatgagggagcagcgcctcattgcctgggctctgggcaggtctgggagccaggccgtttgcaggatggcccgcgatggtgcagcactttgtgcagacagattttgtggaattgccgatttgggtttcttcttttcttctcctcctttttaataatacagtaattactctgggctacaaaggaagtaggcgagggtttttttaattgaaagttcctgttgctcatcccaagcttaggggaagccagtatgccagccattaatttggggattggggtagtcctgttggtgtgccaggcacggttgggagggggggcactgtgtcttttggaactggtgggggttaccgcgcgcccgagtggcagactctagcgccccagcagatgcgtccgcagagccactgggacggacggaagctgagcttagggacagccggagttgcttgccctggggcatctggagagggggatcctgttgagcgtttgatgttgcctcctttctgcaccccccaccgagctgccccaggcccccaggggctcatggtccgtcaaggccttgaccgaggcctggcggagggcgggtggtggatggaggcagcgctgtgggtgctgttggggccgagtgccgggcacagcctggcaggggctgcgggcctcgggtggcagtgggcaggccagcatgtggggctggctgactttctctgaacccagaggggacacagggcccatgtgaaggaggcctggcccgagtcctggttagggttgcggtggtggcgggcagctgtgggcttcgtcctcaggtcagcctcaagtcctgtgtccagctagggctcggtggccgtgcgcgtgttgggtcgagctctggtgtcaggcgtgccgggtccgcctcccccatcccgcggatctgcagatctgcaaatgctccgccggcagccacacgagagaacctgttggttggcggcctctgtgcaaggccgtctgagtgaggcctgcagtctggaggctccctaggtcgggaggctccgcgtctgcttcttcctcattctggagttctcgtggggcccgtgctgtggggcttcctgggaagtgggtggagcgcccattttacagatgaggaagtcgaggcctacctggcctgcttgggtagaggagaaggtggtgtttcccgagggctgactcccacacctgtgcttctctggtcacccgccgtgccagtgggagcagtgacagcgaggggtggtggccctgcggccaggggacgggcctcaccgccttccccatcctctctgctggctctgtccagagggctgtgccgccctgtgactggcacgtgggtgcagccgtctgctgggtgggtctgtccgggagcttgactggcctggctgggtgggggggggtacccctttgtgctacctcagcgagggctcaaagtgagggtctgggaccaccagaacggtgtattcaatgcactgcgggcagccctgcagcgggcagggattgagtgaggggtggggcctgcctggctcctggcaagcacccgtctggcgggcggggcccagtgagcctcctccctttgccgggtcctcctgtagtggggcaggaacctctagcatcccacccttgctgccctttttctgccccgctcaccacccacatcaacttgtcaccagcaagggcatgggacaaagcaggacatgccccgggtggccagcgtgagctagctgtgcccaggagcattgcccatgctgtcccccaggcactgtcctgaagccctgctgggttctgagtcctccaggctccgcggccccttctcgccctgcccagagtctctggccaccaccgctgcttggggccctgcaccagcctgtgcgcccgcaaggttgccagggcccctctgcaggtgcagcgtgagctgtgtcctgggcccacaggggagccgcttctcagacccccgggctggccccaggctcccccggcagcactcaggcggccctggcccccggtgcggctgactgttcggggcacgcgtctgaggtgtggggatcatctcccccttgctcagagcccccaacgtgtcccctgcacagggaatcggggcagccccctgccagccctgcccagggatccctcctgtcaccctcaggcgtgctcctgggtggcccagcggcctccctgcaccgtgaggcccgagacagtttcgcgtgacatcatgttgaaaacagccagctctggccgggcgcgggggctcccacctgtcatcccagcactttgggaggccgaggtgggcggatcacctgaggtcaggagttcaagactagtctggccaacatggcaaaaccccatctccactaaaaatacaaaaattagccgggcgtggtggcgtgcgcccataatcccagctactcgagaggctgaggcaggagaatcacttgaacccgggaggtggaggttttagtgagccaggatcgcgccactgcactccagcctgggcaacagagcgagactccgtctcaaaaaaaaaaaaaaaaaaagctggttctcccttgatgcgcatctgctgaacttctggggcacgctggggtagagcagtgggtccctccctggagaggccatggggtgaggaccgaagctgtgggtgccaagtggggcaggcagcccagtggagtggggcaagagactctggtctggccggcctgacccgtggggtatgactcttgttacggcagattccatctaggagcggaggccacgcgtatgttcccgggagaggtgggaagtgcatcccgtggcctatcccggggaggtcactcccattccatacctgcagggggagctagctgcctcacgtctgtgtctcaggccgcgcagaggagggggcgcaggtgagggcagcgggaagaaagactgcaagaggctcgggggtcacgggccagggctggcccatcactatttattcgtttatttatttatttatttattttttatttatttattttttttaagatggagtcttgcactgttgcccaggctggagtgcagtggcccgatctcagctcactgcaagctccgcctcttgggttcacgccattctcctgcctcagcttcccgagtagctgggactacaggcgaccgccac[187 bp omitted]gatggagtctcgctctgttgcccaggctagagtgcagtggcgcaatcttggctcactgcaagctccgcctcccgggttcacgccattctcctgcctcagcctctccagcagctgggactacaggtacatgccatcacgcctggctaatttttgtatttttagtacagacggggtttcactgtgttagccaggatggtctccatctcctgaccttgtgatctgcccgcctcggcctctcaaagtgctgggattacaggcatgagccactgtgcccggcctattcatttatttatttagagacagagtctcgctctgttgtccatgttggccaagctggtcttgaactcctgacctcaggtgatccacctgcttcagcctccctcatagctgggattacaggcgtgagccaccgtgcccggccctatcgctatttaaaaggcagagaaaatcttagaggtttttttattgtcaccagcggtgtttcgttgatgcgtaattgcctttggaggcttgaaaaaagttgtgcttaaaggtaatccctcaattatctggaaacttccaccctccagagtgaggcaccccaagtcctggtctggattcgtggacagagtccctgcctgtgaggcctgatggccagtcctctcgccttggccgtggtgcttcaggccctgttgcaggtgggacccgccctccttagggaccttgtttcccaggtgatgctcatgtaatctgcggtgacctctgccccttcccatctgacctctgtccccaggaaagatggcaggcgtgcgagggctcatcctgtccgcggcagttgtgcccctcgggcttctgctccagtggtcctggggcagggcagctggcgctgatgcccaggctctgcctggggacagttcccaggacgggagcctgagggcagcgcacgggaccagcgtgaggacacggactggcccgtgtctgcctctgacttgctgggtgtgcctttgagttcctctgagggtgggtgcgccgagggggatccagctgggccctggccacgtgcaggccagccagagccctggagcctgcaggtgggctgggacagggcttgcgaccgcaggggtggtgtgcgtttgcgctggcgtctgcacaggtgtgtgcgtgctgtgccatcacgctggtcaggcctgtacgccgtggagaggggcgctgtgtggggctcgctgcctgagccctgggtggaccgtggctgccccatgagttgtcggggacctccgctgccccttggacctcgcccgcggccctgggcaatgggtgtggtgacgtcctggggcccccatgagtcagctcgtcctcgtgcccgggcactggcctctccttcctgtgggcgcacagccccggttcctctgaaagcttcgtgggccgggacccgggatgagctggttaaaccctggccctgtgagcaggaggtgtggcttcggggggcggccccgccctgggctcagacttgatcctgcaccggagggagccattctggaaggccgctgccccgggccctgtccctccccctctcatccccagggtgctggc[185 bp omitted]gtggcaggcgcctgtactcccagctactcgggaggctgagggaggagaatggcatgaacccgggaggcgaagcttacagtgagctgagaccgcgccattgcactccatgtgggcgacagagtgagactccgtctcaaaaaaaaaaaaaaaaaacgcaaaaaaaaaaaagatcccgtcacactgacccagctcactgttctcttaccagccttatttcggtgtggtccttagagcatgagccacttttttttgctgggaacataatccacgtttggtaaaattcggcaacgtgtgcacgcaagtggtttttgtacagctgacccttgagcagggtggggtttagggcagcagcccctcatgtagcaaaataccctcgtatagctttcgagtcctccagatgccgctgccgacagcctgctggtgaccagaggcctcgggaggacacgtggtccgcgcacacatacctcgtgtgttgtgttaggtgctgcgttctcacagtgagggaagctggagaccagaacatgtggagaaaagcagaaggaagagaaaccctgtttgctcttcacgcagtggaagtaatgctcatggaagcctctgtcctcgtcgtgttcacgttgagggctgaggaagggagggtgggtctcgctgtctcgggtggcagagcgggaaggagccaggagaggctggcgccctcagggcaacctttattgaaaaaatccacgtcagagtggacctgtcagttcaaacctgccgtggtcaaggctcctctgtgagtgcagccaccacctgtaattccagagtgttctcatcacctgcaaagggagccctggccccatcagcagccagccttccacaccatcctttccagaaccttcccaccttcccaaattgagacgctgtcttcgtgaaacgttcactcccgtgccctctccagcccctggcacccccatcctactttctggctctgtgactctgagggctccagggacctcctaggggtggaatcacacgggatgaggcctggtgtgtttggcgtctctcactgagtgtgacaccctcggtgcatccgcgccatggcccgcgtccgagtctcgctcctgttcgtggctgagtcgtgttccggcgtgtgggtggccacgtgtttatttctgtgatagatgtttgcatggcatccgcgtgtggctgctgcgagcacccgtgtccggttcccgtgtggctgcgtgattcttctgtcaggtggacttctagcggtggaaccgctggtcacagggccactcccggttggaccatttgaggagccgcagacggccatccatacctgcactgtttgggtcccctgccgggttttggggactggatctctgcacagcgacgaccactcccctcttccggtgacttggtttctcctgtccttcggcccgatgcttctctggcctgcagggcatcagggaccctgctgtcctgatccccatgccgtctagaaagccaggggtcctgcatgtgcccggtgtccccactgccttgtcaggcacagggccagatcctgcaccctgtgacgagcacggccagtgggacagacagatggatgtgctgcccgtgaccttcgccacagcgagttcagaggccggaggcatccagtgtccacagagtgaccggtaggccccagccccacaggatcatcgaggtggccctggcctttcgaggccacaaaaatcaacgtttatttttatttattttatttatttatatatttatttatatatttatttatga[131 bp omitted]caccacacccagctaattgtttgtatttttagtagagacggggttt[144 bp omitted]ttggagaacttgaacattacagcaacatctgaagaagatgttctttcacaaacctcagattccaggagatgagcaccgtccgctttccagagaaaattgtctgaggcctctgggagacaggagggggtgcacttagaaacagccaaggcctccttccatgttgggacggacgggccttcctgggctggcccggcctaaatctgctgccgcccaccgaacaccaaggcaccttctcgtgccccagaggccaccagcacccgtccccctgcctccctccagccagtgtcaggtggggacctggccgctggaagggaggtgtcacctgctctggggcatccaggagggaggggctgcgggagttttgctggagaccctccaggtgggggttatggggtatcatggcggagcgtgttgggaagttttcggtgagctgggcgtttattcgccttggtgcccccctagatccctgggtgatccccgtgcccagttttcaggggagaccatgggggtcagagagctggccaggcgggtggtctgtgtctgtcccctgctgttgaaatgaggggaggtgagaggagacgccgtgtgcctggggagg[142 bp omitted]ataccctgtctctactaaaaaaaatacaaaaaattagccgggcgtggtggcgggcgcctgtagtcccagctactcgggaggctgaggcaggagaatggcgtgaacccgggaggcggagcttgcagtgagccgagatcgcaccactgcactccagcctgggcgacagagtgagactccgtctcaaaaaaaaaataaaaaaaatcaaagatgggggcctgctgggaccgtttgatttcttcccattcagaccctgccagatcctgaggctggcccagctgcctgtgtcctctggggctccctgaggaggcagcaccagctgtggtgtgcatgacggacaggggtcccagttggggggtgcagcctcccgatgggccaggatgggggatgcttgggtgccctcaggatgtgcaggctgggcgggaggaagcggtgagagtccacccctccccaccttcctcttctctgctgtttttttttggagacagagtctcactgtgtcgcccaggctggagtgcagtggtgtgatctccgttcactgcacgctccgcctcccgggttcacaccattctcttgcctc[189 bp omitted]gctgttttctgactcaacatcatgaaacaggaccttaagctgagaagtggtgagattggggccatcctcatttccacataaggccgtgttcctgtttactgggggctaggacttggcatgtctttttcggggatagcccaacccttctgtgtgaaaggggtcgtgatggtcactgcaggacagcaagcacaccttggcccctcagtgggcagtgggtgcagggctggacgagggcccagggggcagaagctagtgcgccgatagcgtgtgtcatctgcggcctgtgagcactgatgatgcccgagtggcggagggcgggatgcttccacgtgctcaactttttttttttttcttgagacagagtcttgctctgtcgctcaggctggagtgcagtggtgccatcttggcttactgcagcctccacttcccgggttcaagtgattctcctgcctcagcctcccgagtagctgggattacaggcgtccgccaccatgcccggataatttttgtatttttagaagagaccggggttacaccatgttgtccaggatggtctcaaactcctgacctcaagtgatcttcccacctcggcctcccaaagtgtacgtatctttttagtaacgatatatttgacgatgattaaaaaaacccgatccttgaaggcccttgatagatgctgaggtgagtacaggcctgactctgagggtcatgcgcctagcaggcgtcgcccggtgcacagggccaggagctgagtcgtgcgggactggatggaggccaggggatatagaagacctgggcagctccccaggaccaagccctctcgcctagggctccccggggagttaggccgaaccctgctgtgcccttcactctgcagccctcgtggggatcatcacagaggcaggagctggcaaccgaggtgactgccttcgagtggagggaaaccggggcgggatgtcgcccggcggctcccacacgatgaggggaaaaggcactccagtctgggtggcagagcgagactccgtctgaaaaaaaaaacaaaggaaatgtagaaacgcagcccacccaggttttccacggccgttcatggttacgcttctggaaggacccgtgtcctctcagatgtagcaggattccgatgggagccaccccgggtcccactcgcccccgggacctgccgtgggagctttctttcctggtggggtgcctgactctgcctgcacgttccccccgctgtctgtggcaccacttgggaccggggacccctgcccccctggcaagaccaggtcagctctgcccccgggccacggagcaggaagcagagctgaggctgctgaggtggcgcagggttgctgtgggggcctgtgcgccatgggggcctgggtgggggtgttctcacttcccccggagtctggaaggccgtctttgtgatggatttgatgcagatgtgtccactttgcttttgttgatggcgtctgaggctctggagtccatggcagccttgcctccgtttgcataatctgaattttgggaaaattgcccctatgtggactagttgcagggacagtgccctccgccaaggctgccggtggtgtttgccttatgtgtccggtgctgggtgagtgccagcttttccctggtcagctctgcccgtggccctcacctgtggtctgtgccatcaccagggcgaggctgacctgtgggacggggtccctgcacagcctcgccgtcccccacatccccccaacagggtctggtcccagctgccattgtgcagccttgccccctccccccgcatcagggtccggtcctggccgctgtaccgcgatcacctgtggccctcctgtgttctttacctggactcttgcctttgctgatggcgacctgtgacggctcagctgcgttctcagaggccggctgtcctcgtgggcgtctccggtgcagtcggcgcggtgaggttggcttctgccatggacggggccttctcgtggtgatgacagtcgcccttggtctggtgtctgcagtgctccgaggaccggccctgcccatccctggcgttcactcctcagcttcctcccatggggtgggcggcttccctcctctccctgatttgtggggtgtttctcttttgcacctgatgcgttaaacccattaccggcctaggtcagcctgaggttggtttgtcctggccgcggcagctcctgcgcccctccattgtggagggcgcccttccgtctgccctgcgtcactgggctgggcctggccccgctctgctgtggccctggcactggaagtatgtgctgccctggtgttcgggggctcttgggtcctggggcgctgcaacccctcattttctttccttggggtgcagatgaattggggtggcagggaaccgagcccacagtggccagcccctgcggccccaggtcagagggcagggccggcctggacagagctgcccagaacggtctgcggccgggtccacatgagtctaggtgcctctgagggcactgggacggcggtggcctgcacctgcccagcccagtgaggtccctggcctcccttcagctttgccctgggctctgggctgagggctgtgtggtgatgtcagcccagggactgtgacatcactcagtggagacagtcagagaagggggctcccggggccctccccagggaactggccctgggcccagaccagatggaggaccccgaaaagaacagggcaggtagcagcctgaggctagggctggggaaggggatgggagctgacggggagagagcagccccttgtgggatggctgcaatcccctcgttggcgcccgggagccatccttggcgtgtgacccggagccggcactcgccccctgggacggaatcgtggctgcgtgggttgggtggaggctgggtgaggatcagcgtcccttcgtccctccctggggttgttgcttttcgctgtggccctcaggcaacagggcaggcccccaacccccaggcctgcgtgggcactgtgggtgcccagcctttacgtcctcgcttccttccaggccccggccttgtctggcttcccttgggcaccccctggggttcggagagccccagaagaggccgggctcttcctccttggtgatggacgggtgctgggccctgaccgagtggtgaccgcctccagggagtgatctgcgccctcggaagctgctgagtcttggagtggcggctcttgtttgtgggggcagggggagctgggcacccgccctgtgcccacggaacacagcccagggtggcggccctgcctgtcctctgactgccctcctgctgctgctgctgctgctgcgagggcctcaggcgcaggcggtgactctcggggccactcctgaggtgggggatgtgggctagcggccaccgtgggcggcaggtgtgcaagcagtgctcccgttttccactgggctgcccttcaccggctgtgggtcagcgccccccactgaggctcaggctgaggcgaggctccgcggggtgggcgtgtgccagggtgaggctccgcggggtgggcgtgtgcctgggcgaggctccgcgagtcgggggcagcgcccaggtcaggggcttctccgtccatgtcaggcttagggtgggtgtggctgggccctccctctgctgtccgcccacgaccccctcagaggggctgtcgtgagatgcttggaggcgggatccagccctgagggtgcagggagtgctcagcggacccccgtgccactgctgtcaccggaggaggctgctgctcggctccgggctccatctgcaaagccgggtgtgcatctgtgtggctcagctctgcagggcacagtggggtttgctcccggccggccctgaggccgggcacagggaggccagtgctcatccagggggccagagagaaagtagcaaccccaacctgcctgggccacaacagccaagaccactgtatcagaacagacgccagcggggcagcctgctcgttggccgggcggagcagggtcggcacacagcccgggctggccttcaccccagctcccgacagcgttgggtccctgagtgcagggcctgcccctttctcatcctcctgcctccaggtcatggggcaggggtgccgagaggccctgcgggagccaggacctgagaggtgatggtcaccacccagacgaggggccgggggtcgcacaaggaggcttccagggggatgccaggagcagtggggccctagacccagcagtgggtagacccagcagggcagcgctcacgtcacaggttctgggggttggggcttgtcatctgtgcaggtgcagctgggatggggatttggtgctttttgttctgcaaaagccagaacgcatgtagctgagccaagatcagacggcatggtgcctcatgcctgtggtcccagctacctgggaggatgaggcgggaaaattgcttgaactcgggaggcggaggttgtaatgagccgagatcctgccactgcactccagcctgggtgatggagctagatcctgtctcaaaaaacaaaagaccacgcatcctagccggcaaggccactctgtactcagacccggcagctgtggctgtggcacaggcgcttaccctgcggcattggccctttcagtggttggtgttgaccctccacagaggggctgggtggggtgtgtccagtcccatctgggtagactgagtgttggggatgggagagtgtttaaggaggtggcggttacagactccagcatcgggacacggggccgtgggtcatacccacatccgtgggggctgtgagacagccgtccagaagcttctgtctccgggccaggaggacaccccagagagccccaggaggctcgttccggaatttagggctcagcctcgatgaacctggccaggcggcggttgatgggttaattcagttaatcacacatcactcagggtttctcagcagaaggaactgaccaagccaatggctcacctggaagagagaaggagggaggaggaggggattctgcagagggaaggctggtggtggcgccccccttcgacggtcgtgccctgatgctgcgtggcttaaacggtgccacccggagattggtgggcgggattgggcctctggggtccccggctgtggagagggcaaggcaggggcggctagaaagaaaagcaacctggacgcaggccccacctccctccaggcagccccacaggcccgagggccaccgtgtcaggagggatagcctacacggagagcaggccagtggccctgtgcccaggagggtgccttgcccagcctggaggcccgcaaggatgagaagcagtgtgtgcccgggaggtcacgtgggcaccacagacgaaagtggagccgggggagagatgtcccgggatgcaccaggcgctcgtgcaaaccaagtgctgagcagagagcagcctgggagagaagggggctgccccgagcggcttgggtggccgggcctgtgggagaccttgggtttgctgttaggagggacagtgagcgcaggcacctctctctccacttcatgtttgtcctcactgagggagccgagcagatgcctttgcccctgcaggtcccccatgtcccctcgcccggggcgcgctccacaggctaggccactttcacagctcaccacacaggcagagactggagggtgcgcaggaccccgggtgactgcagacgtgggcacagaggggcctctgagggcgtctggcggcatttgagcagctgccagatctcccctggaaacactggggtgtgtgctcggtgggtgccgtgtgtggggggtatgtgctcggcgggcgccgtgtttgtggggtgggagctaggcgggcgccgtttatgtggggtgggcgctcggcgggcactgtgtgtgtggcacggccactgcttagggccccctggagctgcggggcacacggcagagccagcctcatgtcaccacgtgcttcccccgtgtgcagggaggggttggaggtgtgcgcttgtcttgtccggaagccgggtgttgggacgcgtcctgacgacggcactgcccacatcctaatgggacacctgagggacatcggtggctgagtaaggggcccctcccgagcaggtctggaggcgttggaagcacagcgcagcctcatggggcacctgcctgctctgcctggaattgaggggcgattgggactcccactgcccccaccaaagcctgtgcccctgatgtctgtccagagcacggcttccttctcggtggttcccagaggccgctgggcctcgcttcgtcctttttgggcagcgagtgtgtatgttaggggaacaggagcccggcagggccgtcttgcagggctcagcagtgggggccgtggggttggtgcaccagggcaggagagctgcccggctcctgctaggtgtctagagggcctcagctctcccaggcactgtcccctgtccccccatctcccctgtcccccccatctccccatccccccgtccagggccgcagcagctcagctctcccaggcactgtcccctgtccctccgtccccccgtccagggctgcagcagctcagctctcccaggtactgtcccccgtccccctgtccccccgtccccccgtccagggccgcagcagctcagctctcctaggcactgtcccccgtcccctcgtccccccatccagggctgcagcagctcagctctctcaggcactgtcccccctcccctcgtccccccatccagggccgcagcagctcagctctcccaggcactgtcccccgtccccctgtccccccatccagggccgcagcagcccagctctcccaggcactgtcctccgttaccccgtccaggcactctccccccgtcccccatcccccgtccaggcactgtcccccctccccccgtcccccccacccccgtccagggccacagcagccggtattgagtgtgggtatgagctttggctctgggtcctgagcgtcccttccccaaattccccatgtggcttcccagtctgcatctccatctgctcccagggtgcgagttggtttttgtattaataactgaggtgtgacactcgggctgtacccgctagctgtgtaactcatgcagctcagtgcctttagctcatcatgaggctgtgtctctgtctgtgccatctaatagaggatattttcatcctcatggcgagaagggatggatttgttttcctcgtgaagtcggtgacgtttgcttttcaggtttggttggtggcctccagtctcttgtcctcaacgagggttttggcagctccctctcagtggcctgtgagtgtccccactcccttgtctgggaaagggctggagctctggggctcacagagagggtgggtgtgatgtctttttcctgacgtggcatcggggtgtcttacctgcccggacacctgcctgcgcagggtagcacagaccctacaggctgcggctgagcccccagcacccgccccacctttaatgctcggcccccagcacccgccccacctttagtaccaccctgagtcccccagcacctgtgccacctttagtgccaccgtgggtcccccagcacccgtcccacctttagtgccaccctgagtcccccagcacccgtgccacctttagtgccaccgtgggtcccccagcacccgccccacctttagtgccaccgtgggtcccccagcacccgtcccacctttagtgccaccctgagtcctccagcacctgtgccacctttagtgccaccgtgggtcccccagcacccgtcccacctttagtgccaccctgggtcccccagcacccgccccacctttagtaccaccctgagtcccccagcacctgtgccacctttagtgccaccgtgggtcccccagcacccgccccacctttagtgccaccctgggtccccacatccctggctacacattgtggctcccacaaccccgtttgggttcacggtcctcctgcaggactctcggaactggggagtgagagtttgttccctgctgttgtaaagggcataacctgggggaagccaggcaggcagaaacccccacccacgtccagggccccatgtagggtccggagcttccctgccctccctggtgccagtcctgaccctaccacagccgaatgtctgcgtcagcacaggggcgtgtaggaagaaaaggcgtcctgcttaggagataggtacatccgggacctggggccttctcgccctcagtccacagggaaggtcccccggatggcgcctgccccttccccctccctacccggcttctgcacgcagtcccctgagatggcccacacgtcctgccgctttctggcaggggagagctgaggcctgtgtcttcaggatgctgcctctcgggcagcctccagccctcgtcgagaaaggcaggcagtgtggcgcgagcaggctggcctcaggcggggcctctgggcagtgtcccctcgggatgtttgccgtgctggatctcacacccggctctgacacgctgccgtgtcccccgtgtgcctgcgcctggggtctccgtgtgtgtgtctgtgtacacgcatgtggttttgctttcttgtgggctggaaaatctaatagtagtcagggcgtggtggttgacacctataatcccagcactttgggaggctaaggtgggtggatcacttgaagtcgggagtttgagaccagcctggccaacgtggcaaaaccttgtctctaccagaaatatcaaaaattaaccgggcatggtggcacatgcctctaatcacagctacctgggaggccgaggtaggacaat[140 bp omitted]tgagagggtttccagaagaaggagaatgtccccgtgctggtggctcatccaggtgtgggccggtgtgcggcggggcgtgggcagaggagaggcttcgggctccggtttcctctcctgtggatgcgtcgcccccgcatggtggtcctctgcggaagtccccctgtccgtcccgttggcagccgcagtggaaagacggatggacgggctgtgacagggacagcccagtgtgaccccagccctggccgtcgcggttgtggcattctcgctgtcagggggctgttcccgtggctctcatggctgtggaggggcgtggagggggcggtccccatggccagaacctggccgtggcgggtggaggacttgaggccggctcagtggtcagcgctgctgcttgttcccctacacagaggcgttgggtggagctgcctcaggtatccctcctggctggggtgtgtgcgtcaccctgagtctccagcccatgctgaggagcctcgcaggcagggcccagcagcctatactccaggccattgctgtccgtttctccagaaggccctgctggtgggtggtcccaggagctgggcctcagtgggggatcccaggacagtggagcctgggaggggccccagtgttgaggcgtgaggtactgtctggaactagggggtgcccccaaagcggcacggcgcccagtccctgtgctggaagagagatgagctgcggtggggggtgggggactacgtctcacagatccctctcccagggcacatgaggagattcctcccccaaaacgcccaggaaggaagttaaattttaatatgggtctggtttagagaaactaggttagccatgcgtgggtgtttctggatgtttgggcagtaaggagagtcggtagctcaagaaatccgctggccgctaagcaggggtgaggggcaccgactgccatcccttcttcaaccacggccactcggccacatcagtgtctcctgccacctccctcgtgtccagcatcaacacagcactgcatccctgacccagtgcagtggagaaaactcgcatccaaaaataaaccaggagtcagccaaaaacacgcaaattaaaattacaccctggccaggcgcggtggctcacgcctgtaatcccaacactttgggaggccgaggcaggcggatcacctggggtcaggagttcaagaccatcctggccaagatggtgaaaccccgtgtctgctaaaaataacaaaaattagccagatgtggtggcaggtgccttgtagtcccagctactcgggaggctgaggcagagaactgcacgaacctgggaggcagaggttacagtgagtcgagttcgtgccactgcactccagcctgggcgaaagagtgagactctgtcaacaacaacaacaaaaaaagcacacccccagcatggctgtgcccagaagcacagaagtggggtcaccacagctcacgcctataatcccagcactttgggaggccgaggagggaggattgtttgagcccaggagtttgagaccagcctaggcaacatagcaagatcccatctctacaaaaaaaaaaaattagccagacatgggggtccatgcctgtggtcccagctactcgggaggctgaggcaagaggattgcttgagcccgggagacaagttacagtgagctgagatggtaccattgtgctccagcctgggcgacagagccagaccctgtctcaaaacaaacacaaaagctcacagaagcgctggggtgggtgtgtagaagtcagacccccgggagcggcaggtggaggacgactcggtgcagcagccactgtggagacgacctggtggctcctcaaagatgcacagatctcccatccgacccagcacgaccactcccagctatgtacccaggtggagtggaagcccgcagccacgcagaagcccgtgcgcagacgccgccgtggactccagcagccggacggtggctacaacccagatggccgtcagcagaggaggaggcgtagtgtggccctccatgcactggaacacaacccagccatgaaaaggaagaagctctgactcaggccacggcgtggacgcaccttcaggacgccaggctcaatgagacactccaggctcaatgagacacgccagacacagaggacatgccgtgtgtgatcccatttctatgaaatgtccagggcaggcccagccacagagacagggagtaacgtggtggtttattataaatttttcatgaaaataaaatatacagtactctcgtgagtttattatagcccattgattctttttgtttgtttttgttttgttttttgagacagagtctccctctgtcgcccaagctccacctcccgggttcatgccattctcctgcctcaccctcccgagtagctgggagtacaggtgcccgccaccatgcctggctaatttttttgtatttttagtagagacagggtttcaccgtgtcagccaggatggtctctatctcctgacctcgtgatccccctgcctcggcctcccaaagtgctgagattacaggcatgagccaccgcgcccagcctattttctttctttgaggcagtgtctcgctgtatcacccaggctggagtgcagtggtgtgatctcggctcactgcaaccttcgccttgcaggttcaagcgattctcctgcctcagcctcccgagtagctggagttacaggtgcacgccaccacacctagctaatttttgtatttttagtagggacagggtttcaccatgttggccgtgctggtcttgaactcctgacctcaagtgatccacccactttggccttccaaagtgctgggattacaggtgtgaaccactgcgcccagcctctacaaattttttttttttttttttggagacagaatctcgctctgtcgcccaggctggagtgcaatggcacgatcttggctcactgcaacctctgcctcctgggttccagtgattctcctgcctcagcctcctgagtagctgggattacaggcacccgccaccatgcccagctaatttttgtatttttagtagagacagggtttcaccatgttggccaggcttgtctcaaactcctgacctcaggtgatcccaaagtgctgggccttggcctcccaaggtgctgggattacaggcatgagccaccgctcctggcctacaaaaatttttttaaaaattagctgggcatggtgatgtgtgcctgtagttccagctactctggaggctgaggtgggaggatcacttgggcccaggaggtcgaggctgcagcaagctgtgattgcgccatggcactcctgcctgggtgacagagtgagaccctgtgttaaaaaaaaaacaaaaaaaaaccaggttcaaggtgaaaaggattaagtgttccttgagacgtgtcagccagcattcagacgatctagccaaggtcactgctggaggtggcttttcagggtagaagaaacagccttctggaagaagatgccacccaggactttcctcgtgtggaagaagcggttccctggcttccaaggagaggcccaccctcttcaccctcttgttaggggctaacgcagctggtgacttgaaggtgatgccagggctttttaccattccacaaatcctagggcccacgagaattatgctaaatctactctgtgctctataaatagaacaacagagcctgggtgacagcacatctgtttaacacctggcttatggaatatttgaagcccacttttgagacctattgttcagaaaaaagtttttgtttttttgtttttttttttgagactgattctcgctcgtcacccaggctggagtgcagtggtgccatctcggttcactgcaagctccccctcccgggttcaccccattctcctgcctcagcttcccgagtagctgggactacaggagcccacgaccatgcccagctaatgtttttgtaattttagtagaaacggggtttcagcgtattagccaggatggtctcgatctcctgacttcatgatccgcctgcctcggcctcccaaactgctgggattacaggtgtgagccaccgcgcctggccaaaaagatttctttcaaaatatgactgctcactgacaacgcacctggtcacccaagatccctagtggagacgtacacgatcagtttccggccgggcgcggtggctcacacctgtgatcccagcacttcgggaggccaaggcgggcagatcacgaggtcaggagatcgagaccacagtgaaaccgcgtctctactaaaaatacaaaaaattaaccggccgtggtggcgggcgcctttagtcccagctactcaggaggctgaggca[137 bp omitted]catccagcctgtagcctgtggatcaatgaatgaatgaatgactcggaaatcaagatgactccttgacatgtcattcattcatttatttatgcatgacaaggtgtcccactgtcacccaggctggagtgcagtagcacgatcttggctcactgcatcctccacctcccgggttgaagcaattgtctttcctcagcctcctgagtagctggggctacaggtgcgtgccaccatgcccagctaatttttatattttttcatagggggtttcaccatgttcctcaggctggtcttgaactcctgagctcaaagcagtctgcccgcctcagcctcccaaagtgctgggactacaggcctgagccactgtgcctggccaagtcttagtgtttttgaggcacggtctcactgtgtctcccaggctgcagtggagaagcagaatcacagctcactttagcctccacctcccaggctcaagcgatcctctcacctcagtctcctaagtagctaggaccacaggtgcgcaccgccatgactggctaattttgtttttatttttgtaaagatagggtctccctgtgttgcccaggctggtcttgaactcccggcctcaagcagtctgcctgcgtcagcctcccaaagtgtcggggttacaggcaggagccaccgcagccgcccatgactctcattattgagaaatacatttgtaaggctctaggtgcctgtaggtgccgtggagagcaattcctctgatggagctggggaaattgggtaaattgaaacccccggaaaggctttgccgttctagaggctgtgaaggacacgcgtgatccatgggaggaggtaacatgtcaggatgagcggaagtttggaagaagttggtcccaggcctgaaagatcactgtgagggttcaggacttcagtggaggagggactgtagaggttttagaagcagcaagagaactagaatgagaaggacttggagatgtgactgcattgtcgctgtctcgcgagaaaactttaacacgtgaggagttgcctctgaagggtgagcaggggagttgcttcagttgcgctctagtcccagtgaagattctgtgaacctgggggtaatgaggacaaagaacttggaacagcccggaacctcggttgatgaagccgcggccgggttgagaggaccgactgcagttctgaaagacgttctgctgtgggtaatcaatgctatcagacagcatcacgccccacagagaaatctttcatgaaaggaagagtccatcgctgtggccaacttttttgtggtcatagtttaagaagttgccccagcctccagcagccaccgccccaacgagtcagccgccgtccacattgaggcaagacccttctccggggagattagggccactcccggttcccatgatcattaccattgcttagcagtaaagtatttttatttctttattatttatttaagatggggtcttgctgtatcccccaggctggagtgcagtggtgcgatcatagctcactgcagcctccgcctcctgggctcaaacgatcctcccgcctcagtctcccgagtagctgggaccacaggcttgcacaccacgccccgcttaattaaagtgtgtcctttgattagacacaacgctactgcacacttcctagaccacggtatactgtgaacgtaacttgtgtgtgcactgggaaaccagaacattcgagcggctgttgccgtgcggaacccaaggcctgtgatccccacagggtgtttctggcaccggaacgcaggggccacatccaggggggcagtgcttgtgacgccggtgccttcgtttctgatgtggcttactcagctgggagttcctgtcctaacattttcggcgatggctgtgcacccacggcccctcttcacccgcggcccctacgtcctgccggttggcaggaaacctcttcccctgcacatctggggcacagcagcaaactgtggtcccccttcttcagtgagggtggggcttctgtctgtctggagccctagaatggggccaggggtggctggggcctgggtcagggaggacccggcaggatctgtgcagacaggcaggtggctgcggtggctcccggtgcagggttcttggcctcctgggcgggtacctggcttgagggcgacgaggtgacagccgcgtccctggggttgcaccacccgagcgtccagttaacaccacagctgccacccttcagttctgcaggtggggctcctccctcctccccaggctgcccccaccacccttcagttctgcaggtggggctcctccttcctccctcctccccaggctgcccccgaccacccttcagttctgcaggtggggctcctccttcctccctcctccccaggctgcccccgaccacccttcagttctgcaggtggggctcctccctcctcccttctccccaggctgcccccgaccacccttcagttctgcaggtggggctcctccctcctcccttctccccaggctgcccccgaccacccttcagttctgcaggtggggctcctccctcctccccaggctgcccccgaccacccttcagttctgcaggtgggggctcctccctcctccccaggctgcccccaccacccttcagttctgcaggtggggctcctccctcctccctcctccccaggctgcccccgaccacccttcagttctgcaggtggggctcctccccaggctgtccctgaccacccttcagttctgcaggtggggctcctccctcctccctcctccccaggctgccccagaccacccttcagttctgcaggtggggctcctccctcctccccaggctgcccccgaccacccttcagttctgcaggtgggggctcctccctcctccccaggctgcccctgaccacccttcagttctgcaggtggggctcctccctcctccctcctccccaggctgtcccgaggctccttgctggggaccgtcctgcctcccgtcggggcctgcgctgagactgggctccatgccagccggggctggctggccccctcgctccagagagcgacctgcacagagtcccctcagccatgagcccctgtccagacacggcgtttctctgtgggtggcaacaggctctggggccctcagctctgggctcgggagcatttaaggtggtgcagactcagcgaggggctgtgggctggggtcccaccatcccgggagcagggactgcgtgttccttctcaggaccagaggcttctgtcttttcccctggggtagaagtttgctgcctgccccgtgcccagccttgcttaggtggctgttggctccgctggtccctcaagccccgccattccctcctcagctccgctctgcaccgaaggggatgggtccgacccagcctggcatcatcacagcctcgagtggcgtccagcctgccccgctccaccagtggctgctggagaagaacccgagcctgggtcaggccctgggggctcctgcatcagtgcccggctctccggggcctcctgccctccggcccactctccccgctctcagcatcaaccagtcgccatgggcaggggcagctcggtggctcctgtgtccctgcctcgggcctgcctgctgtcatctgcctccctccctctttcccagagcggccctgggcctggatacggggactgttgtgtggcccctctgtgtctgggggtgcgactgctcccctggcttcaggatcctcagggcttctacccgggattggcagtcatgctctcctggcagtacactctcccacctgtgccacccacccacccacccacccatcccgctttacagaaagccccctgagccctaccctgttcgtccccaggcagccacgccgagatctctggcctctgatgtcatgtgatgtgtgcttcccagctgggttccgggcagggacggtgctcatcatgccccggccttcagagctccttccagcccagcagtctcctggctgtgtcctctgtggcctccgccccgtgtcctcagtggccccgcgggggccttgccggtgctcacctgtgcctctgtttctctgcagctgtgagccgtgagctttgaggcggtgggatgtgtcagcagaatgtctcctgcccccgagagcgaccccgaggccactgagaagagcagcgcggcctggccggcccgaacgcctgcgtctcagtagctgggagccacgggcccacgcccgcccaccggccgcagtgatgttctagccacagaggagccaagacctcaggtttccagagacttgggatttgcacggcagcagagtcaccgtggagaggccagggtatcacaaacttatggattttgacaagaaaggagggaaaggggagacggaggagggccggagaatgtccaaggccggcgggggccggagcagccacggcatccggagctcggggaccagctcgggggtcctgatggtgggccccaacttccgcgtcggcaagaagatcggctgcggcaacttcggggagctccgcctaggtgaggccctgctcggtggtaggtggggtcgggaggctgctggcagggccgccccgagtcaccggagcctctggtggggccgcccggggtcactggagcctctggcggggccgccccatgtcactggcaggtgcgttgaatcatcagtccgtcgtggtgcgagtgccacttcccttcgaggaggttctgtggggagagtgggtttctggccctgtcaccttttcgggaaacagttctgttgggaggcaggtggcccagagcaggccaggccacgccgcaaggagcccgatgttaagttgtgaatgactttcatggcccatgtgcacgctgggcgaagccccggctttaacggcaggtgcctgcccggcactcagctcgtgggaggtcttggccagcccggagctggcgtcaggtggctggagtgactgttctgtggtgatgatactgctgtgtgccactcccagcttcaccatgtaaaaggccgcacctggcccacctggctccgtcccttctgctcacaccaacctctcccgggtcggggtctgattgcccgggcaggcgtgaggagcagggccgaggactgagcctctcattggccaggggtgccttccctggggtgggggtgcctgaagatgaccatcaggcctgggggagctctgagcacctttggggccgttcccagtctgtgattagctgggccagggagctgaatcatccccggaaatgtggttaaatttattgctggtgctgccggagctcctgcgggagggcatttggcgtctgttgctggggttgtccggggaacccaggtgcacccccagtcagtgtctgtcgtggtgggaatcagggtccctgggaaagagcgcaggatgggcaggtccgagaggccacggcagtggatcggcctcacgtgggcacccatggcaggcggtgcccatggcacccatggcaggcactcagcccgatgaggttgtcagatgagggaaacaggcccacgcagtggtcatgatgtggctgcatcttcaagagcggccgcccaggggcgcaggagcatgggctgtggcggcctggaccccaggcatgttttgtggccctgcttcccacctcctgcctcactttacccacctgttaaatgaggatgaatggtagttgccactcgtgggcagaagggttcagcaggcagttatgcggcagaagtgtgtgtcctatgagtcaagcagcttctcccaggcgagggcagctgttggggtcactgttggctgtttctgtgttcccattggttgcacccagggccccaggaggccggggtttgagaccccacccgaaccagatcccaccccagcccttggggaggctgctgggattccacctctgcgcagaggctgggcttgggccacgaagcctcactgccggtccgacggcctgtggctcaggaggcccgggctccgtttctcagccaagagactgagcttttcccaacaggagctgtggcctcccaaccccgtgtgtgtgtgcacgctcagacacacgtgcagacacatgcagacatgtacacacgtgcccacaaatgcacatgtgcacactaaagcacacgcacacaggcgcacacagccacaaccacgcatacacaggcacacaggctcatctgcacacacatgcctggcacagccccgtgacctgcagcctgcggggtatggcttttgggaacccagatggctatgtgggtcctgtccttgggcggcggttgcaggctgctgaatagtgcaggtccctgtaggcagatgagagtgacgtgggtgatgccagctttttttttttttttttttttgagacggagtctcgctcggtcacccaggctggagtgcagtggcgcaatctcggctcactgcaagctccgcgtcccgggttcacgccattctcctgcctcagcctcccgagtagctgggactacaggcgcccgccaccacacccggctaatattttgtatttttagtagagatggggttt[141 bp omitted]cttcagcctggcattttgggcgctgtgtgcttcgcgggcagccgcacatcgtggtttctcaggggtgccgggaggccgtccatcggaggacacaccagcccttcttcatctgctcccagcgcagggacgcttggctgtttctggatttgggcccttctgaatagaactaactgcccaaatagaactgaatagcactgggctcctcgagcactccacgtccccagcactcaggactgttggtggctttgatgttgagcctgttgtggactccggttgttgaatgttgttccgttgtctagaatgttctagaatgtgtcgttttttctgtttttaaggtttttatctttgatttaaaatattgactatgctctccttagatgaggctttctgtttttatcctgcttgggatccactgacttcttggatctctgtgttggtactttttcaaattaactttggaaaaatgtgagccattatttcatgaaacgtttttccatctcagctttgctttgctttgttttgttttgtttttgagatggagtttcactcttgttgcccagcctggagtgcagtggcaccatctcggctcaccacaacctctgcctctcgggttcaagcaattctcttgcctcagcctcccgagtagctgggattacaggcgtgagccaccatgcctggctaattttttatatttttagtagagatggggtttcaccttgttggccaggctggtcttgaactcctgacctcaggtgatccacctgcctcggcct[136 bp omitted]tcccaggttcgtgccattctcctgcctc[224 bp omitted]gctggagtgcagtggcgcgatctcggctcactgcaacctccgcctcctgggttcaagcaattctgcctcagcctcccaagtagatgagattacaggtgcctgccaccacgcccagctaaatttttgtatttttagtagagacagggttttgccatgttggcaaactcctgacctcaggtgatctgcccgccttggcctctgaaagtgctgggattacaggcgtgggccaccatacccagccttgctctcattcctgggttctggttctgcgtgtgacaggagtgcttggccctgtccccaggtccctcagccctggctgttttccgtctgcctctgtgctctcctggtgtcaggctgtgcggctgctgctgctgctgcttgaaagtttactctttttctgcagcctccaaccccagaagtccatgtggtgaatctttgattgcttagtggcatttttcggtttcgtctgattgtccattcgctctcagctgagatttcccatgtgcacattcactttggccatcttttcctttaaatctttgaacatgtttgtgctgtttcttagtccattttgtgctgctgtaacagaatgccacagactgggtcatttatttttatttattatttattattttttgagatggagtcttgctctgttgcccaggctggagtgcagtggtactatcttggctcaccacaacctccgcctcccgggttcaagcaattctcctgcctcagcctcccgagtagctgggattacaggcgcccgtcaccacacccagctaatttttgtattttcagtagagacagggtttcactgtgtgttggttggctaggctggtctcaaactcctgacctcgtgatctacctgcctcagcctcccaaagtgctagggttacaggcatgagccactgcacctggccagatcatttataatgaacagaaattgatgggctcaccgttctggaggctggtgagccccagattgagggtggcgtctggcaaagaccttcttgccatgtcatggcaagaaggcatggtggaaggcaggacggcacagaccggagggggctggattcgccctttagtcaggaacccactcccctgctgatggcattcactcatccacgagggcagcgactcagatcctctctctaggccccagccccagccccagcagtgctggattggggaccaggttcccaacacatgacccttggggggtgcatcaaagacacagcactgtgtggagtgacgtctgtgctgcttcttcctcccttgtcacggtcacacctccctcactcacctgtgggacagcctcactgggcgtggccgtggtgtgtgccgtgaggtgtggagggtgccgtctcccggcttgagcgctgagtttgtccccgtggctcaccttgtttctgtcaggttggtttcagcgttgctggggcaaggctgagggtaaacatgagcgactccaaggccagggagccctgtgccaaggtgtggaccttttgggttctcagctgaagtagagaatccagggaggaccccgcactccggccattggagctgtggcgtcctccctcctgtgtgtcccccggaacctcctgagcctctctggagctgttctctgccaggccccgtgggctctcctgccctctgcatgcatcgcgagtactgccggaggaggcccctttggctttcagagcccagagcgcccgacctcctccaggagtctgcagatccacaggcctcagatgctgccacacccacccagcacacacccaggtctctgacacgccagccgcacacagcggtggggttcaggcgaaggtttcttccacagtgcagagtagaagagccgggaaggaccccatcaccatcagatgcatcagagcttcaaaggcccgcccatcaagacgctgccaagagcatgaggccagccaggctggggaggacgttggcgagcatccgcctgcccgtcagggagccacagctggatgatacatcgacagacagcagagggacggtgtagcacacaggcgagggcttgtcctcctcagcctgggggagcgcagctcagtgcttggtggtcagcacgtgactgacactttgccggagaaggggacggctgcccgcaggaagagctacacagccgtgttcgccggaactccgctctggagagtcagaactggagacgggagggcgtgcctcaagggcagatgggcaaaccaaaccccatcctccctgtgagccgcggcacagcaccaggcgggcacacgcagcacgacacggcgaggagcccaccgcaggggcagccttttgggcggggaaggggggatgaatccactgtgaatcccacctccgaagggcagcgcaggaaggacacgcaaatgctggactgaacctgcagctgattcagggggcagtgtcctgagctctaaaacttcaaacctggggcagtgtcctgagctctaaaacttcgaaatctgaccaggcacagtggctcacgcctgtaatcccaacactttgggaggctgatgtgggcggatcacctgacgtcaggagttcgagaccagcctggacaacatggagaaagcccatctctagtaaaaatacaaaaattagccaggttgatggtgcctgcctgtaattccagctactcaggaggctgaggcaggagaatcgcttgaacccaggaggcagaggttccagtgagccgtgatcgcgccagtgcactccagcctgggcaacagaacgagactctgctccaaaaagaaaaaaactttgaaatccctctaaaaataaaatggaccggtggatggtagctgtgaggatggaccgtgtggcaggtttagttctggggcctcggcaatgagtgttgggtgtttggggcacggctcctgttgttttacgaggagaatttcctaataacgtgttacactggggagaacgtaggaggggagcccatttgttctgaaaacgcggggaccagccctggtccccggctcaggactggaggggttgccctggtccctggctcaggactggagagaccagccctggtcccgggctcagggctgcagggaggcacctggtcttccctcgtcctcacgatcctgcaccctcaagatgccacgttgttgaggctgtttagggaacttgacaagctgattggaaactgtgctgaaatagagcccaggtagtgatgcggacagggcagtgccagaaggagccccagcgattcctgtgctgcaaggcacgcccaggacggggcactagccgggggaagaggctctcagggcccaggtgggaccccagcctcagactatgaggtcatgactgtgtacagctcagccaccgggctttgggactttgaatccaccttagcagggtttccaaacccattgtctccacggccaccctgccagtccagctgcagcagggcggaacaaagtggaggcctctttcttgctttctttttttttttttttgagacagagtttctctcttgttgcccaggctggagtgcaatggcaccatctcagctcaccacaaccttcacctcccgggttcaggcaattctcctgcctcagcctccctggtagctgggattacaggcatgcatcaccatgccaggctaattttgtatttttagtagagatggggtttctccatgtttgtcaggctggtctcgaactcccgacctcaggtgatccgcctgcgtcagcctcccaaagtgctgggattacaggcataagccaccgtgcccggccacagaggcctcattctgcagcgtatgctactcgggcaaaggcagctgactgcagacccaacacggtgacccagctggatggtgcctgagagacggggctgccccacatggtgccctgtcatgccgcgggacaggtcgcccagcagatggtagctatggccccagtgccatcctgggctggagacacatgggtgccagacacgttcatgcctgtcgtctggcccagctgccgtggggagccctccagggccgtgtgcctgcagggaccggcctgttcacctctaggctcacccctcgggtgctgagtcaccacagtgggtggggccgtgccccctcccaggccggcttccacagctgcccctgcagagcgcctctgtgttaagggctggccgcctccttcctcagggggtgtaacatgtaaaaagctgcaccctggcctgtacaggggctcccgcctgttatcccagccctgtgggaggctgaggcaggcagatcgcttgagctcaggagttcaagatcagcccgggcaacttggagaaaccccgtctctactaaaaatacaaaaattagttgggtgtggtggtgcgcacctgtagtcccagctacttgggaggctgagatgggaggatggcttgagcctgggagacaaaggctgcagtgaactgcgatctcgccactacactccagactgggcaacagagcgacaccgtctcaaaaaaaaaaaaaaaaaaaaggttctgggcctcgtaccttctgcgctttcatgagactcagccctggaagtcctatgtggctggtggccccagggaacaggacctgggctcctctcttctaacccatgtgggccacaggtccctgtccatctgtgctggggctcacctgggggccgagggcctcgggcatgtgggagatttgtctttgagaaaggggtggaggagtgtggagcccttggggctgcctgcaggccgtgagagacctccccagtgccgcttctgtcctgggctagggaggtgggggggcgggggaggaggagtggcagacactgaggcggtgaccacacgggcagggtgcaggtgtcgggatgacttggcaggccatggtgcagtgctctggcaggctgggcccaggccctgctgctgggcagtggtgtcatttggagggtggtccttcagggaccccctcctgcctcctgcctcgggggtgggctggggaggtcggggctaggtgggccctgcgctggcggtgctgatggtctctgtccccgcaggaaagaatctctatacaaatgaatacgtggctatcaaattggtgagtcggcccctccaccccacccccgctgacgtgccccccagggatttcagggcagcgacccggtcccctggtgactcgctcttgtgcccccaggagccgatcaagtcccgggccccgcagctgcacctggagtaccggttctacaagcagctcagcgccacaggtaccgggcggcccgcgggtggggcgggggctgcgcaggggcagggagggggctgccgccgcacgcccgtgcgtctgtcctccgccgcagagggcgtccctcaggtctactacttcggtccgtgcgggaagtacaacgccatggtgctggagctgctggggcccagcctggaggacctgttcgacctgtgcgaccggaccttcacgctcaagacggtgctgatgatcgccatccagctggtgcgcggcgggcggggcggggcggggctcggagggaagagggtggccctggaggggagcgcgtgggacggggaggggcccggccgacaccgccgtgcccccctgcagatcacgcgcatggagtatgtgcacaccaagagcctaatctaccgggacgtgaagcccgagaacttcctggtgggccgcccggggaccaagcggcagcatgccatccacatcatcgacttcgggctggccaaggagtacatcgaccccgagaccaagaagcacatcccgtaccgcgagcacaagagcctgacgggcacggcgcgctacatgagcatcaacacgcacctgggcaagggtgagctgcgcgcgcgcggcggggggcgggcgcccggaccccgctgaggctgcgcccctgtccccgcagagcagagccgccgcgacgacctggaggcgctgggccacatgttcatgtacttcctgcgcggcagcctcccctggcaggggctcaaggtgggcgaggaggccgggcaggcgggcggggacgcagggcgggagcaaggctgaccacagacccccgcaggccgacacgctcaaggagcggtaccagaagatcggggacaccaaacgcgccacgcccatcgaggtgctctgcgagaacttcccaggtaaggggtccctgcgcccccgccctgtgccccccaccccccaccccccacccccacccccgccgaggccccgctggcgctctctctgcagaggagatggccacgtacctgcgctatgtgcggcgcctggacttcttcgagaagcccgactatgactacctgcggaagctcttcaccgacctcttcgaccgcagtggcttcgtgttcgactatgagtacgactgggccgggaagcccctggtaggtgggggggtgccggtatgtgggagcgggggaccgggaaactgccctgagggagatgggaaccggcgctgcagcccatcctgacccctgctccctcacccacagccgacccccatcggcaccgtccacaccgacctgccctcccagcctcagctccgggacaaaacccagccgcacagcaaaaaccaggtgaggcccgggcgggaccgaccgccccagggaggggcatgggcggccagcgtgaccccctactgcccccaccaggcgttgaactccaccaacggggagctgaatgcggacgaccccacggccggccactccaacgccccgatcacagcgcctgcagaggtggaggtggccgatgaaaccaagtaaggctctggggcggtgccttcggggaggtgggggtgccctgggtccccatgggggtgggagggcctgaggcctgggctgcccccgccctgcaccccggtcctcctacctgagccactgccctcctcagatgctgctgtttcttcaagaggagaaagagaaaatcgctgcagcgacacaagtgaccctgggcgcgtgcagccccctgaatcttctccgtgcagccccttggggcgcgaccttgtgcgaggccctcggggcccacccacagcggcccagggccagaccctggctggaagccagaacgcagactgcaggggccgcgcctggctcaggcggccccacccccgggacgtggggtcacttccttcatgtaagactttggccgaaatttctacacctgtgtctagtcctcccctccaagagcattaactatttaaaacaaggaaaagaggaaaaaaaaaacagaggcccgccctaccccactcctgcccctccgtttctttgctgaagtgagtagtgtgatcctggaggccccccggcctggccccgccccgccagccgcccccgttagcgtcataaagtccagcttgtctccctcgatccaaaggccgttttctcgaggggagggcaggcccggcctggaggggtgctgtggagctgtcttgcccaggccctcctgggagggggacaggcattgttgccaggggtgaggccgtgccccaggcctccccgaaaccaaaggggaaggcaggggtggggccgtggctgaagccggctccccaaccaaaatgctgcaccaaagctcgggcgccgcgggcacggctgctgcagtctcttcccagcctggccctggcaaggggcgggtgggcgctgccaggcgggtgcttctcgacgcacttgctcccggaggctgcgccccggcgcctggaacccgaggtgggaggaccggttggtgtcaccctgctcggccctcagccctgccgcgtggggcgcgtgggcacggagcttcctgcctctctgctccgacacccggcaagcagccggagacaaaacgccttaaagcccccggcccagccctgcaggtatattgcaggggcctgggggcggccctggactggcgggcggttccccagtggggtgccctggaggctgccgggcagagtggagcagcttggggccgtgcccagggcggtggctgtgagtctagtttttgctttaccaagtgtacagaaatggcatttacgtttctctgatgctcccttgaagccatagaatttaggggcttttttaaaaaaataaaagaaaaatgaaaccaaacccaagtgtagagggatttgtctgggctttccacgaagcttgacctggaacgggcgttgcttccatccccatcctgcctgtccgggacgagtccggagcggctggcggcctccggtaacagaaaccgactgatgaggcggaaggtaaggaagatggaagcagagggcagagctgggctctgtctggggagagggcaggagacgagtgttcacgtaccatggaaaggggaagtcacacacatgcgacttggccccgggggtcccgttccccgacactacacaaatatacctgaaagcctcagcgacggggcccaggcaggatggtcctggctgctctgacggcggaaggcctccttgactccctctgttcacgcagcagggcagaaaacatctccacgggggccacgacactgtgaagggaatcagcagtagctcccagaagaacagcggaaactgcaggcaggtgaagaccttggcagcactagccccggctccgccccgtgccttctccccagacaacaccccatacccggcagcaagggtggaagaccagtaccaccgtaatatgttgtgacaaagcagaaataatgcacctgtaagagtcagatggcaagagggaaatggaatgagctcatcgatggttttcccggcagtagcttggggataaggactacttgtcatgtgctttatatatttacccacatgttaaccttttctgatgctcttcatt[132 bp omitted]aaccctgtctctactaaaaatacaaaaaattagccgggcgcctgtagtcctagctactggggaggctgaggcaggagaatagcgtgaacccgggaggcggagcttgcagtgagcccagatctcgccaccgcactccagcccgggcgacagaatcccaaaactacctctgggataattttcagcctgaagaacttcaatatttcttacagtgcagcttttttttttttttttttgagacagggcctggcctaggctggcgtgcagttgcacagtcatagctccctggagcctccacctcttgggctcaagcgatcctcccacctcagcctcccaagtatctgggaccatagacgtgcaccaccacactcagctaattgttttgttctgttttgtttttaggtagagatagggttgcctgtctggctctgttgtccaggcacttgcggaggacgaggtgggaaagtgaccctgggatgagaggcgtgagccaccacgccgggccgagtgcagctttgtcggtaacaaattacaaattagcatttgttccctgaaaaaaatatttatttcacctttcttaataaggatgtttttgctggtagtggcattccaggttgacaaagtgtttgtttgggacagagtctcgctgtcacccaggctggagtgcattggcgtggtctcggctcactgcagcctccacctcccgggttcaagcagttctcctgcctcagcctcccgagtagctgggattacaagcgtgtgccaccacacctggataatgtttgtatttttagtagagtcggggtttcaccatgttggccaggctggtcttgaactcctgacctcaagtgatccacccacctcggcctcccaaagtgctgggatgacaggcatgagccagcatgctccactgacaaagtttttaaaacgcggcggctcacgcctgcaatcccagcactttgggaggccgaggctggtggatcacaaggtcaggagatcgagaccatcctggccaacacggtgagaccccatctctactaaaaatacaaaaaattagccgggcgtggcggcaggcacctataggcccagctcctcgggaggctgaggcaggagaatggcgtgaacccgggaggcggagc[138 bp omitted]tcatatagcttgagtctcattctctctctctccttctgggactccacttacacatacgttcaaccctttggctgtgtcacgtatctcgatctgttctgtttttccattgtttttactcactgtgcttcaccttgcatgtttgtttgtttgttttttgagacagagtcttgctgtgttgcccaggctggagtgcagtggcgagatctcggctcactggcaagctccacctcccgggttcacgccattctcctgcctcagcctcccaagtagctgggaccacaggcacctgtcaccacacctggctaatttttgtagttttttttagtagagacggggtttcatcatgttagccaggatggtcttgatctcctgacctcgtgatctgcctgc[132 bp omitted]tgcaacctctgcctcccaggttcaagtgattctcctgcctcagcctcccaagtagctgggattacagatgcacgccaccacgcctcgctaatttttgtatttttagtggagacgggtttcgccatgttggccaggctggtctcgaactcctgacctcagatgatccacctgcctcggcctcccaaagtgctgggattgcaggcatgagccaccacgcccagcctgtcatttttaaatggatgctggacgttgtaaatgacagatggtagaagctggtgctgatgtttcttcacagggctgtgttttcttttggcagggtccagcgtaacagcagcccagtgagaccctaccagggttttgttttggagtgatgacggcttccgttctgtcctccccacaggagtgttgccctagctcctggtgggtggcccttctggtgtcttcattagaagcccaaggtgtttccttttaatatgtatttttttagagatggggtcttgctgtgttgcccaggctggtctcaaactcctggcccctagcagttctgcctcagcctgccaaagtgctgggattgcaggtgtgagccagcacgcccggcccccagggtgttcgacaaggccccctaccccgccagcctccatctccattgcctgctcccagcactgcgcactgtggagatctgctcagccttcagcctcctggcaactgtttgcggctggcttttttttttttagacggagtcttgctttctcgcccaggctggagtgcaatggcaccatcttggctcactgcaacctccatctcccaggttcaagcgattcgcctgcctcagcctcccaagtagctgggattacaggtgcctgccaccatacctggctaatttttgtgtttttagtagagatggggtttcaccatgtcggccaggttggtcctgaactcctgacctcaggtgatccacccgcccggcctcccaaggtgctgtaatgacgtgtgagccaccacgcggccttgctgccgggtttcttgatgtcttgccctgcacgtgtgctcctgaggcagcagccaacggcttgacttctctggccactgaggccacaactgggcactccctgctttctctccatctctcacatccacggtcccccagcagccagcagggcctccccacggggaaatcggcacacacgtccattgcatttgggtttggggggaggtgttgagttagttagggtcttgctcttgcccaggggggagggcagtggtgcatcactgctcactgcagtctcgacctcccgggcttcagtgtggcctgtgggtacttaaggagggtctcgcagcactggcgaccagacccggggttcagggcccctctcggcgcacgacatccctcgcccactgcagcccggatgacagggcagagagtgaaggggagcaaagcagtgtgcgctcaaggcaggtgcatttgtttctttatttaaaaaaatcatctgggggcatggtctgaggaggacacccctcccatggctttggggaggacgcaggttccaggagtcacagggcagaaacacgcggggtgggtgggggcgtggccggagtggggaggggctgtgcccccagcacctgggggtggctcccacggcaccaggtgggctagggcaacagtatgtacaggcgagcagtgctcctggacccggtcggggccggctggggccccattctgcggcaggggagctctggggcacagggtctgagtcccatcttgggctgcagggaccgcgagggccgtccagggaggctggacagcgggggcctttatctgggcccatcaggtggatgagaacggacactgcaaaccgctcaccacctgggccagggctaggcctatccggcaggggccgtccccacactgaatcctgcgtgcgcagaactcaagccggcatccaggcagtgggaacgccccgcaggctgggcttgggtggcctcgggcacgtgacaggtggggcccgtgtcctgataaacggacaggaacaaaaggaacgcaaggtctgggacccacggctctgggagcagcgccacccaggctggctcctagcagagaaatgggaatcgcaaatgcattgcaatgtgcagtgaagagacgcgagggacgcccgcggcgcaccgccggcagacgacgtgggcaggcgccctgagctgcgggtccgtgggccctggcccaggccggcacagccctgtccctagtcctgagggattgtctccacagggcctggccactggcctggccacctccccggctgccctgatccagcagccacactcgtggtgaacacagggcaaccccgtcctgatgctgagaaaggtggcatggagtggacagacggcctgggggacactgggcctggcaccgcgtggtgggggggccccagcagcagatgatggcctggggctgcggctatccccacggagggagggcggtgtcggtgtcgggcagcctaggtgtagaagatgacctcggggatctggccgtcctccacggatgtgccattgttgttcccggccgcgtagcaaaaggtgaagcaggtcttggcgcccgtggtgggcgactcgtgtgtcaccttgcgcaggcctttggtgccgtagtgggagtctgggccctgtagggaataggggtacagtgaggtcaaggaccaccaggctgggatgccccaggtgtggacagggcaaggccccgactgggccagggtggctgcctctggagagtgtgtgctgtgccccggtggcttcaggatgggccagagactcccacggagggacccctgtccccggcggcgcaccttgagcgtggcacaggccgtgtagttgacgttgggcagcacctccaccggctccttgaacatgacgcggaaggtgctggctgagccgtcgcagctgaagcccgtgtcgttctggcccaagacggtgttgctatcggtgtgaataatctgcggggaggtgggaagtgggaggctcaggcctggggagggccaacggggacccctcgaggcccagcccacctgcccagggtgggggcagcacagggaccagggccgggggttcagccagggttccatggaggtggagagaggacatgggcctgagtggggcctggggatgaggcttggggctggtacctggatgttcacttggtagtcggtgggcccgtggatggatccatacagcccaaatcccaccacgaagatgcgcttgttgactgagaacctgccgtggcagatgacaggcagcagcgtggatacccagggatagcctaaggtgagctggggcgagcccacccccatgcccggtcccctccatcgtccctgagtcctccacccccatgcccggcggcccccccgccgtcttcatcatccctgagttctccacccccatgcccggccccccatctccgtcatccccgagtcctccacccccatgtccggacccccccgcctgcaccccaagccccacctgatgcggtcactggtcccgctgtagccccagcgactctccacctgctggaagcggttgatgctgcactccttcccacgcaggcagcagcggggccggtcaatgaactccactcgtggcttggggttgacggtgaagtgcaggaagaggctgaccacctcgcggtccaccaggatgcccgactgtgcgggacctgcagcacagggagggtgtgggggagggccgggctgcaccccaggatcccgagtgcctgggaggacacgctccttccccctaagatgtctgcgtcggactttcaaggtgcagggacctgggcagcccctccccgggggactagccaccagccatggcccctgctgcctgggcttttagggagaggtcccagggcacagaccagaggccgacagatacgctcactcaggggcgatgcctcagggtctgacagatgcactcactcaggggtgatgtctcagggtctggccccactgtagggaccacccgtcacttcactgtgggtgggggcggggggctccactgcctgttctctcagggccattggctgggaggggtcactgtggctccctgctaggcctgtaccccccaggctgcagccctggcttctagaagcagtctgggggttcctctccacggtgggccctaggcagacaccttctcaagcgcttacacccccaggggtgatggctagcggaccccaggcagactccaagagccaggctcttaatcccggtgcagagatgtcacaggcagagggactgtgcatgggatgtgaaggggctctgggtagggaggggaggccaggaggggcagaattgggggtccaccatccacccccaggagtgccaggacacagcaccctctgctctaatgagagcagccctgcctgcctgagacctaatcactcatcaaccaaggtgggctcaactccgcatcgctcagctgcaagccagcccagtgcagacacagtttaataactggtgagaaacagaccattatgggttaagtgaatcaggaagactgagtatcaaaactcaataaacaatgttaacaattttttttttttttgagacggagtttcgctcttgtcccccaggctagagtgcaggacggagtttcgctcttgtcccccaggctagagtgcagtggcgtaatctcggctcaccgcaacatccgtctccagggttcaagcaattctcctgcctcagcctccagcatagctgggtttacaggcatgcgccaccatgcccagctaatcttgtatttttagtagagacggggtttcaccctgttggtcaggctggtctcaaactcctgacctcaagtgattccccccatcttgggcctcccaaagtgctgggattacaggagtgagtgacccagcctggccaacaattgtatatatttttttattttaaatggagtttcactcttgttgcccaggctggagtgcagtggcgcgatctcggctcatcacaacctccacctcctgggttcaagtgattctcctgcctcagcctcccgggtagctgggattacaggcatgagccaccacacccagctgatcaacagttgtatttttaagaagtatgtatctagccaggctcggtggcccatgtccataatcccagcactttgtgaggccgagatgggaggatggctggagcccagttcatgaccagcccaggtgacatagcaagaccctgtccccacaaaaaaatacaaatataagccttgtgtggtggtggcacctgtgatcccagctactccggagtctgaagcaggaggatcacttgagcccaggaggtcgaggctgcagtgagctgtgattgtaccaccgcactcagcctgggcgacagagaccctcttgctaaatctggcgaccttcagctaagcaagagcgggggccgcgtggacctggggaaggccagacggcgagtgtgcaccagccccagggctctgtcccagccccttctggaaagttccaggcctgttttgctccagagctggatggcgtcaggcagtgagcagccacgagggcaggaggcatcgttagcgctgccccttcacgtcaccctggaacccaggccctgcagcaggggaccccaaggcccactcgggcgcatgacagccaccccggccatgtcagagccctcctgagctcgtcacagacactggtacctgcaccagcaggtagcacaagggcgcgagacggggactcccttccctcctgggaagatgccaccaaaacagctggacagacacgagaggcggggtctggcagtgtgcacggtggggacagagccgggccggggctaacagatggccctgtggacgcgtcctcacaagccaggtttcttcctatctgtatatgccaggcatctgccaggctttccgcagtgaactcgggggcactatcctcggtacccagatgcccacctgtgtgccactcccctcccaaaccagcccctgagcccgagctctgttacctgcagcgaactcctcgatggtcatgagcgggaagcgaatgaggcccagggccttgcccagaaccttccgcctgttctctggcgtcacctgcagctgctgccgctgacactcggcctcggaccagcggacaacggcattgaacagccgcacctcacggatgcccagtgtgtcgcgctccaggacagccaccagcgtgtctgtggggtggaggaaggggctgcgtgaacacgacacccacatgcccaccctgcaggaggcagtgagactaacgtgaggaccagcagttaaagccgggctggcaactatggcccgtggcccaaatctggccctgtgagtgtgtttataaataaagctttatcaacacaagaccacgccccttcattttcctcggctgtggttgtttttaagccacaaggacagacttgagtagctttgacaaaagctgttcaacagcaaagtcaaagccatggaccatcggaggacgagatggtcaccatcagctgggatggtgggctctggcctgtggcctcctggccaaggccccggactcccgtggggctgtgctaggacccaaactcctgacctgctgcaagtggtgaggccccagctcacctgtgcaactcccccaggcccaaagctcccactgtcaatccccggaccctcccgccgaggccccgctgggattcccacacctgggctcctgggcccttacccaggtcaatgtcggtgaagccctccgcggtgatggcgtctgcagtgtttttgtcgatgttctccaggcacaggctggccagctgcggttcatcgaagagtcgcgcctggcaagagacatcgacggggggcgcggtggggacatcagcacccagccctcggcagatccccagtgcggggccggttcaaatgcagccctgaccacacgggccttcctgagcgtggccaggagccaccagggtctcagccaccaggccggccctgttgtgggcccagagactcccctgtgaccgctgactggggcgggagagttggggagttccctctcaggacctcagaggccaaggaaggaagaaaaagatgctcaggtccctgtcggcagggcctgctgctttaggcaaaaggggcgttgcagctgcactcggggggcagcagggcccaggaccccgagtggcaggcagaggtgaggtggccggggccgaccggtgaagcttcccgaccacaacatgcccttggccacttgtggtgggaggggccgtgtccccggcagctccatcccaagacaaacagcagacatgacttctgacagtcaggtgacagagctggaggacgcctgtgctcttagggaaacagaggcttagttagtggaaggtgctggaagggcctatgccagcagggacccgggcaggcctttctgcgggcatcctcccgaggacacctctcaagtgggttcgtagtggttttaggggcagggaggctgaggcagccacaagatgaagcccggggagtgagctccagcctcctctcagctcaggcagaggcctctccagcaaggcgaccagatgacccggacaagaaacccctccctgtgggagtccgggatgccctgcatctgacctgccaggatggagggggagaaggttctgggtcctttccaggatgccggacccccaaagcccattggaggacccagtgccgctgtcccctctggccaccctccacccccgaccaggagctcacggctcccaagcggccgtccacccgtactggccccacgtcctctcagcctccctggcctgcacgacctccccagcccccgccctttgggctgcacagagcccaactggggtcccctgagatccctggccctgctctgtctacctgacatttccttagagagagagagaaagttctctctggtttttttttttctttttttttagccaggcgcggtggtgggggcctgtaatcccagctactgtggaggctgaggcaggagaatcgcttgaacgctggaggcggaggttgcagtgagctgagatcgtgccattgcactccagcctgggcaacaagagaaaccccgtctcaaaaaaaaattattttactttttttttagagacagggtctcactctgtcactcaggctggagtgcagtggcgccatctccactcactgcagcctcaacctcccgggctcaggcaatcttcctgctttggtcccccaagtagttgagattccagacatgcaccagcgtgcttggctaatttatgaaatatttttttttagtagagatgaggtttcaccatgttggccaggctggtctcaaactcctgacctctggtgatctgcctgtctcagcctcccaaaatgctgggattacaggcatgaaccacagtgcccggcctgaatctttttttaattttttgtagaaacggggtctctctatgttgcctaggctggtctagaactccgggcctcaagcaatcctccctacttggcctcccaaagtgctggggttacaggcgtgagccaccgcaccctgccaataattttttgaagtatcacggaaaagtccaaaacacatctttttttttcaggtggagtctcgctctgtcatgcacgctggagtgcagtggtgcgatctcggctcactgcaacctccacctcccaggttcatgcaattctcctgcctcagcctcccaagtagctggaattacaggtgcccgccaccacgcccggctcttttttgtgtttttagtagagataggatttcgccatgttggccaggctggtctggaacgcctgagctcaggtgatctgcccgcctcggcctcccaaagtgccgggattacaggcgtgagcaaccacgcccggcccaaaacacattttactaccaggcaggagcctgctgcctcccgggcccgcccccggccccgcctccgcctccagcctcggtccgccccaccccggccccgcctccagccaggcctggccccgcccccgcctcgtaccggccccgcccacctgcgtgagcagcatgaaggcgttgtcggctcgcaggttcttcttcaggaactccacgcaatgggcctcgagcgctggcaccgcgtacttcttggcggtgtatagcgtggtcatcaccgtctccgggccaatctgcacctcgtccgagtagagaaacctgcagaagcaacgcgggtggccgtgaggtgggaccgccatgcccgcccccaggggagagcgtcaggggaccactcagaccgttagactcggccaccggcccttgagctggcaggacccaaacacccacatcaggttccccgaggaaccttccagaattagcccctgtccgttgccctctgacatagggacacgacttggcaaggtggtcacccatgaaaacgagcaagaggctgaacccatctacacagcacacacccggaagcgtctatatggcctgtcttgttctgcccgggatgccccaggagagggcactgggagctgggtgtctccttcttgggcaccttttccatgaggaactgttggttccccacctcgggcaccaccgaaaacctcaaccacttctgggtggatcatagaacccaacacgctaattaggatcatggataatcatggacgctattaccacctgccagcgaggggcccacacgacactgaatacagatcagaagttgggccgatcaaaaatagaagcacaggctgggcctggtggttcacgcctgtaaccccagcactttgggaggctga[134 bp omitted]gaggcaagagaatcgcttgaacctgggaggcagatgttgcagtgagctgagatctcgccactgcactccagcctggagacagagcgagaatccgtctcaaaaaaaaaaaaaaaaaaaaaaaaaaaaaaaagcagcacaggccggcctggtggttcacgcctgtaatcccagcactttgagaggccgaggcgggcagatcacttgaggccaggagttagagactagcctggccgacatggcaaaatccccctctactaaaaatacaaaaattagccaggtgtggtggcagacacctgtaatcccagctacctgggaggctgaggcacaagaatcgcttgaacccaggaggcggaggttgcagtgagccaagatcgtatcactgcactgcagcctgggagacagagtgagactccctctcaaaaaaaaaataaaaaataaaaaaatgtctccagcctggagcagtggctcacatctgtaatcccagcacgttgggaggcagaggcgagaggattgcctgagaccaggagttggaaaccagtgtgggcatggtgagatcctgtctctaaacacatttttttttcagctgggcacagtggctcaggcctgtaatcccagcactttgggaggctgaggcaggcggatcatgagatcaggagatcgagaccatcctggccaacatgatgaaaccgggtctctactaaaaatacaaaaattagccaggcgtggtggcgtgtgcctgtagtcccaggtactcaggaggctgatgcaggagaatcacttgaacccgggaggcagaggttgcagtgagccaggatcgtgccactgcactccagccatggtggcagagcgctactccatctcaaaaaatgaaaaaataaaaaaatattttttttctctcccagcctgtgggtggcatttccactctgccggtattgtcctttgaggtatacatttttaacattttccctaagtccaatgtctttgtttattcttttcttggctgtgtctttggtgtcatatccaagtaatcatggtcaaacccaatgtcatgaagatttgattctggtttttctttttttgttgttgttgagacagagtctcgctctgtcgcccaagctggagtgcagtggcgcagtcttggtttactaaaacctctgcctcccaggttcaagcgattctcctgcctcagcttcctgagtagctggggttacaggtgcctgctaccatgcccagctaatttttgtatgtttgtagagatggggttttgccttgttgcccaggctggtctccaactcctgacctcaggtgatccacccacctcagcctcccaaagtgctgggattacaggtgtgagccaccgcgcctagccatactttggattcttttttttttttttttttttgagagggagtcttgctctgttgcccaagctggagtgcagtggcatgacctcagctcactgcaagctctgccacctgggttcacaccattctcctgcctc[349 bp omitted]tgcctcagcctcccaagtagctgcgactacgggcgtccgccaccatgcccggctaattttcttattttttatttattttttctatttttaatagagacgaggtttcaccatgttagccagcatggtctcaatctcctgatctcgtgatccgcccatctcagcctcccaaagtactgggattacaggcgtgagccaccgtgcccagcctggactttgatctatttgagttaatttttatatacagtaaggtaagggtctaacttcattcttctgcatgtgtatttctagttgtgcctgtgctatttgttaaactctcttttctgttgaatggccttggcacccttgcaaaaaattatttaaccctatgtgcaaaggtatttatttctgagctctctgttccattccattggtccccacgttctgtccttacgccagtaccacactgttttgatgattgtagctttgcagtgagttttgaaatcagaaagtatgagccctccaactttgttctttttcaagatcgttgtggctattcagggtcccttgggattccatatgaattctaggatagtttttctatttttgcaaaaaacagtaattctgataggattatactgactgcagatcgcagtgggttgtgtggacatcttaacaatattctcttcaatccatggacatgggatgtgtttccatttattgtgtctttttaaatttctttcactgatgtttccttttttttgttgttgttgttattttttgtttgtgtactccagcttgggcaacaggagcaaaactgtcaaaaaaaaaaaaaaaaagaaggaaagaaaagaaaagaaaaagaaaagcagggaactggctggacacagtggctcatgcctgtaatcccagcactttgggaggctgaggcaggcggatcacctgaggccaggagtctgagaccagcctggccaacatagagaaacgctgtctctactgaaaaacacacaaatgagctgggtgtggtggtgaacacctgtaatcccaggtactcaggagaatcacttgaaccaggaagtcggaggtctcaatgagctgagatcacaccactgcactccatcctgggcaacagagcaagaccacgtctaaaaaatataaaataaaaagggtgcctctgggctgggcgcggtggctcaggcttgtaatcccagcactttgggaggctgaggtgggtggatcatgatgtcagatcgagaccatcctgactaacacagtgaaaccccatctctactaaaaatacaaaaaaattagccgggcgtggtggcacgagcctgtagtcccagctacttaggaggttgaggcaggaaaatcacttgaacctggaagactgaggttgcagtgagccaagatcacggcactgcactccagcctgggcaacagagcgagactccatctcaaaaagaaaaaaaaaagtgcctctggaacccctcattgcacaggaacgttctagaaatctccaccaagccagggcctctgagctggtgtcagacagggtctacgttctctgaggtccccctccccaggcccagctccccagcaggaagcatccggaagcattacttgagcagtgcgaggaaggcagcgggttccacgtcgggcagctcaatctccgtggatgttgtggccattcccccgttgaacatggcatcaaagacggcgctgcccacggccagcacgaacctggtacgggagagagaaggccctggttaagcccgtggccgccaccccacggccgggagggccagcccggtatcctgggtgaccaccccactagggctccctgccagcctccagcaggcatgtaccaggccccccgatggcagaggcttctggaaggggcctgggacagcaggagggtgatgcagacggacccacggcaaggacaggcagggctaggaccatgccctgggccacacagggcctcacgctctgccagccctcaccatcctctctctttccttccaggcgtcaggcacgcactcattcactcattcccatatgcatgcatttattcacacgtgttcattcacacatgcattcacacatacgttcattcatgcatgcattcactcgctcattcacatgcattcattcacacaggcgttcattcactcattcattcacatattcattcattaactaatttccatgtacattcactcaactcatacacatgcactcattcattcatccacacatgcattcattgatccactgattcattcccgtgggcatgcattcacttgctcatttatgacacatgcattcattcactttctcattcatcgcacactcattcactcacccattcacacacacacacattcgttcattcccacatgcactcatccacttagtctcattattcactcattcattcacactcgtctactctctatcactctcctgctcacgcattccctcatcagcacaagctttcccagggagtcagctacaggcacagggcctggcctcactgagggagacagacgaggaccaaatggccgaacagcccccactgagtgagagaagagagaggagcgtggtcccatcaggaacgcaaggcccagggaagccctgtggggtcatctgagccgccacgtccatggggaagggcatggaggcccaggaacagcaggagcgtgggaggagcgttaggaggcagcaggggtggccccagctgggaaagcggtggctgtgaggacgctgggggttctgccccgtgtgaagctcaggctgcctatggggcccactcagtggctcagatcttcgatatcgccacaggcaggagggtgcggtgagcagagaaaggctgctggtgcctccccaagagccggctatgaacccgcgtttggccaggtctgtatggggtggggagaactccacggctcccaggctcaagacgccactctgtgctgtccatgtacagtccccagggcctgcccacacgatggcctcccagggggctgagagcacacacagcataggggggtcacagacactcagcaggggcacagacgctggtggggcgggttcacagacgctcgcgaagtgggatcacagacgctcggcctgcgcgcggcggagcacctgccccaggacgttgcggtccctgcgtcacctcttccccacctgtccccttccaagtctcccaccacagcaagtgccggctctcaacagcctccccacgcccggaaagctccggagctacaggtggttccgcacggatgggacctgcttctcactcctgcacagctgaacctccaggactggctgggcgacctccacacagctcccgggaaagcccccgtcttccgaggagaagctcctcgctctcctcccaccacacgcgcccccctaaaccccgcaggccctcagcccacccggtccagcccagggcttgactgcaccccagagtcaggtcagaaaccaacgcagtggcttccacatgggccccgaccacagcttccacatccgccccgaacctcggaatgcgaggcccggcggaaacaggccggtgctaactccgtgagtcaggacgaaggcgccggggaaggctggccctaaacagtggctggtgtttttggaaggaggagaaacaggccgggcacggtggcccacacccgtcatcccagcatgtgggagaccaaggcgggaggatcgcttgagcccaggagtttgagaccagcctgggcaacatagtgagaccccatctctacaaaaacattgaaaattagccaggcatcgtggtgagcaagtgcaatcctagcgactcaggaggctgaggcaggaggactgcttaagcccaggaggtcaaggcttcagagagccaggactgcgccactgcactccagcctgggcaacagagcaagactctgtctcaaaaaaaaaaaaaggccaggtgcagtggctcacgcctgtaatcccaccactttgggaggccaa[134 bp omitted]gaggcaggagaattgcttgaacccgggaggcggaggtttcagtgagccaagatcacgccattgcactcctgcttgggtgacagagcaagactaaagactccacctcaaaaaaaaaaaaaaaaagaaaaagaaaaaagaaacagagtgggcggccgcatgaagcagggactggagcgatgcggccacaggccaaggacgtctggagtccccagaagctgggtggggcaggaggatcctcccttgagcctccagagggagcgccgccctcggacgccttgatccatggtcctgggctccgggactggcagaggatgaacccactgagtttgacccccccagtgtgtgggcattgggactgccgcccgcccgtctgccctcctggccgcgtcctcaagggcccaggcctcagggccctgcgccatcacccacagctggtgccccaggacaaacgctcccctcccacacgatgttccagaaatagagtacctgtgcgtgggacttctctttcttgatttaaaaatgtatcttggtctcctgtggggaaaacctttgaggagggttcaaaagcagaaagcaggaggcactcaagtgggcccggcgtgggccgtccatgcagtttggaatcagggagcacctctgacatgggcgggtccccaggcagctctgccggtccccaaggcaggggctcctccaacaccgagcccctccctggagacacctgcatgggccttcaggattcgacccctgggcaccgctactgcctcctctgcccaccgtgagtccccagccccactcccggctgttccccccttcatgtatctgtaaccccttccccttccaaacaaatcgagaacacacggccacacaaaaacacatccacaattgctcacagcagcacgattcccaactccgaacgggggaaacaaccagcgtccattgacagacacggtgcgaccacccacgcactggaacacgacccagccacaaacaggaacgaggctctgatgcaggacccggtgcagatgcgccttgaagacgtcgtgctctatgacagacgccaggcacagaaggacaaatcctgtgtgatccactcctaggaggtccccagagtcctcagattcagagacagaaaggatgggggacgggcacagtggctcacgcctgtactcccagcactttgggaggctgaggcgggcggctcacctaagatcaggagttcgagaccagcctggccaacatggtgaaaccctgtctctatgaaaaatacaaaaattagccaggtgtggtggtggacacctgtagtcccagctactcaggaggctgaggcaggagaatcacttagaacccaggaggcaccgggcacggtggctcacacctgtaatcccagcactttggggggc[132 bp omitted]ggcaggagaattgcttgaaccctggaggcggaggtcgcagtgagctgagatcgtaccactgcactgcaccctgggctacaagcctgagactccatctcaaaaagaaaagaaaacaggttaaagaccgaaagaattgtgtggtgcacaaagggccaatgattccgtgatgtaatctacgcaatgcaacgtccatgaagagccttaaaccacagggctgaacctccaagctggtgactttatccacgtgccacgagggtggccgtcccgagcccacaggacacaggtgcaggtgctccgataccctctggacatgtgaacctcttcatctggctgcaagatgtccttgctgtttttgtgttttgagacggagtctcgctctgccgcccaggctggagtgcagtggcgcaatcttggctcactgcaacctccgcctcccgagttccagtgagcctcctacttcagcctcccgagtagctgggactacaagcatagcaccaccatgcctggctaatttgtgtatttttttagtagagatggggtttcaccatgttggccagggtggcctcgaactcctgacgtcagatgatccgcccgcctccgtctcccaaagtgctgggattacaggtgtgagcccccacgcctggaagagatgtcctttattaaatctttcatttatttttatttcatttttatttttagtttttacaggtgtggtctcactctgtcacccaggctgaagtgcagtggcacgatcatagctcactgcagcctcaacctcctggactcaagcaatgatcccacctcagcctcccggtagctgggaacacacacacaagccacaatgcccagctaactgttaaatgttttgtacagacggggtctcgctatgttgcccaggctggtctcaaacccctgggctcaagcgatcctcccagttcagctgcccaaagcgctgtgattacaggcaaactgataactgtatttctcgaagttctgtaagctgttatggctaattatcaagctcaaggacggagatgtgggactcctgattttagtcagagagaagtgtgggtcacctggggactcgcccctgcaacaggcatctgacgtgggtggcacggggctcagctgaccacctgtggggtctgtgctcactctggatggtgggtgtgagggttgagttaaattgtaggatgccgccgggcacaggg[131 bp omitted]cgtggtggtgggcgcctgtagtcccagctactcgggaggctgaggcaagagaatggtgtgaacccaggaggcggagcttgcagtgagctgagattgcgccacggcactccagcctgggcgacagagtgagactccgtctcaaaaaaaaaaaaaaaaaagaaaaaaaaattgtagtatgcccagtttgtatctacaagatgaggaatcacttgctgtggaaaacccacacacagtgccagaactcctatgaggagtaaaaacagattttcctttatatccaaacagaaaccatgagagctggagtggctacgtcaacatcaaaagaaagacgccactttgggaggccaaggcaggaggatcgttttagcccaagagctgaagatcagcctgagcaatgtagcaagactccgccttgcctacttttct[132 bp omitted]aaccccgtctctgctaaaaaagtacaaaaattagccaggcatggtggcgtgcacctgtaatcccagctactcgggaggctgaagcaagagacttgcttgaacccaggaggtggaggtcgcagtgagccaagattgcatcactg[138 bp omitted]ctaaccaacatggagaaatcccgtctctactaaaaatacaaaattagccgggtgtggtgatgcatgcctgtaatcccagctattcgggaggctgaggcaggagaagaatcgcttgaacccgggaggcggaggttgtgatgagccgagatcacgccattgcactccagcctgggcaacaaaaacgaaactccgtcaaagaaaaaaaaaaaaaagagaaagaaaagaaaagaaaagaaaaaggaatctctggaccccaaaatcactactccaaagggaaaaatcaagctggaaccgcttagggcaaaccagccttctgttctattccttaaaaagacagctaccaagataaaaaagctacatacctccctcccaatctgtccacaaggaaattccttgcagacaaaggacagagagaactcagccatccctccgctcaccgagataaatgcgtatctgattgctgcctttggaaaggctcatcagaaactcaatgcaatggtctgtttcttacctatgacctggaagcccctcccagctaagagtttcccccctttctggactgaaccaatgttcattttacatatattgattgatgtctcatgtcccctaacatgtataaaaccaacctgtgccccacccaccctgggaacataccgtcaggacctcctgaggctgtgtcacaggcacacatccttaatgttggcaaaacaaacttttttttttttttttttgagatggagtttcactagtgttgcctaggctggagtgcaatggcatgatctcagctcaccacaaaatcacaaaatctgcctcccgggtgcaagcaattctcctgcttcagcctcccgagtagctgggattacaggcatgcatcaccacgcccagctaattctgcatttttagtagagacggggtttctccatgttgttcag[131 bp omitted]tattcagggttcacataacaaaccttcatatataccccctgagtcgaaaataaaatcaggccaggagcagtggctcatgcctgtaatcccaggacttcgagaggccaaggcaggaggatcacttgagcccaggagtttgagaccagcctcggcaacatagaaagaccccatctctacaaaaaaaaaattattatttttttttagatggagtcttgctctgtcacccaggctggagtgcagtggtgccatctcggttcactgcaacccgtctcccaagttcaagcgattctcctgcctc[222 bp omitted]accgcggtttgtttctgcactcactggctggtctgcgggttttccggttttgagctactgtgaatcatgctgctctgggcattcacgcacgaggctgtgtgaggacacagattctccttctcctggataaatgcctcggagtggaatgaccctgacgtttaacattttcttttttgaggcagggtctcactctgtcacccaggctggagtgcagtgctatgatcacagctcactgcagccttgacttcctgggctcaagtgatcctctcacctcagcctcctgagtatccgggactagggcgtgcaccaccatgcctg[137 bp omitted]tctcctaaaaatacaaaacgtagtcaggtgcagtggccggagcctgtaatcccagctactaaggaggctgagacaggagaatcgcttgaacctgggaggcagaggttgcagtgaaccaagatcacaccatcgcgctccagcctgggaacaagagcaaaactccgtctcaaaaaaaaaaaaaaaaattattttttagccaaagcagtggctcacacctgtaatcccagtgctttgggaggccaagttgggaggatcacctgaacccacaagttcaagaccagcctgagcaacacagcagaccccatctctactaaacagaaaaaaatcagccgagcatagtggtgcatgtctatagtcccagctacttgggaggctaaggtgggaggactgtttgagcccagaagctggaggctgcagtgagctatgatcgagccactgaactccagtgtgggtgacagagtgagaccctgtctctaaaaaaaaaaaaaaaaatttaatttttaaaaagtctaagagtccaaggggtcaatactagacacacatggctatttaaatctatatccaaattcagctgaattcaacattcaactcctcggtcacactgtccacatctgtagtccgtactggcacatgagtgcctagtattggacagcacacatccaaaccatcccgcttactacaggatactctactgcagagcacaagaccacagaaaaactgttaaacctaataaggcttcaggaagaaacagttcaaaccagataaaagtaaacatgccagctactcgggaggctgaggca[137 bp omitted]ttagaaagaccaatctcctcagtaaattcctttatcacttgacaaactgattctcaagatcatcaggcaccgttagcccagggctggcaaactatggcccttagagtgaatctggcccaccacttgtttttgtaaattaagttttttttttttctgagacggagtttcactcttgttgaccaggctggcctgcactggcactacctcagctcactgcaacctcctcctcccagattcaagcgattctcctgcctcagcctcctacgtagctgggattacaggtgctcaccaccatgcccagctaatttttttattttttatttttttgagacggtctcactctatcgcccaggctggagtgcagtgacgcgatctcggctcgctgcaacctctgctgcccaggttcaagcaattctcctgcctcagcctcccaagcagctgggattacaggcgctcgccaccacgcccggctaatttttgtatatttagtagagatggggtt[142 bp omitted]tggccaggctggtcttgaactcctgacctgaggtgatactcctgcctcggcctccgaaagtgccaggattacaggtgtaatccactgcacctggccaataaagttttattagaacacagctcttcttgctcagttacatgttgttgatttatggctttttgtgctgctacggcagaattaagtagctgcaactgagacagtatggcctgccaaaaatatttactatctgacccttcacatgaatttgctggcacctgtgtcttttatctgttttggttttgttttacacacagtcaaggtctcactatgttgcccacactggtaccaaactcttggcttcaaaagatcttcccgccttaggccagggacggtagctcacacctgtaatcccagtactttgggaggccggggatagcctgaggtcaggagtttgagaccagcccggccaaaatggcgaaaccccgtctctaaaaatacaaaaattagccgggtgtggtggtgcacacctgtaatcccagccactcgggaggctgaggcaagagaactgccgggaacccaggaggcagagctttgcagcgagccaagatcatgccactgcacttcagcctgggcaacagagcgagactctgtctcaaaaaataataaaacaaaacacagaatataagttccataaggaaggagatgtttttctgtcatatgcacctcctgtagccaggactgtatttcagtgagtatctgtagggtggacagatgggtggatgtgggtgactgattctagaagagtaataaatgtgtcagaccagctgagaaagtctttttttttttttgagacagaattttactctttttgcccaggctggagtgcagcagcacgatctcagctcactgcaacctccacctcccaggttcaagcaattctcctgcctcaacctcccgagtagctgggattacaggcacctgccaccacgcctggctaattttgtatttttagtagagacaaggtttcactatgtttgccaggctgctctcaaactcctgacctcaggtgatccgcctgcctcagcctcccaaagtgctgggattacaggggtgagccactgcgcccactctttttttttttttctaggtggagtctcgctgtgttgcccaagctggagcccagtcgtgcgatctcagatcaccacaacctctgccacccaggtttaagcggttctcctgcctcagcctctcaagcagcaggtgcaagccaccatgcctgggtactttttgtatttttaatacagacagagtttcactatgttggccaagttgatctcgaactcctgacctcaggtgatctgcccgccttggcctcccaaaatgctgggattacaggcgtgagccactgtgcccagctttttttttttttttttttagggacagagtctcactctatcgcccaggatggagtgcagtggtaggatcatggctcactgcagcggcaacctcccaggctcaggtgatcctcctacccgagcctcctgagtagcagggaccacaggcacacaccaccatgtccaagtaatgaggtctcgctatattggccagactggtctcgaactcctggggtcaagtgatcctcccacctcagcctcccaaagtgctgggattacagatgtgagccactgcactcagcctgaaaagtcttcacaaagaataaagttgggaagaatttggtgagcagttctcaaaacataccacaaagcagcaatcatcaaacaatgtgttatgggaacaaggactcacaaagcagtcaatgaaatgtgagaccccagaacacactgttcttttttttttttttccaagacagagtctcgctttgtcacccaggctgaagtgcagtggcacaatcctggctcactgcaacctccgcctcccaggttcaaacgattatcctgcctcagcctccccagtagctggggttacaggcgctcgccaccacgcccggctaatttttgtggtttttcttttttcttcttttttgaggcggagtctcagtctgtcacccaggttggagtgtggtggcgtgatcttggctcactgcaacctccgcctcccgggttcaagcaattctcctgcctc[222 bp omitted]tccatgatagagtgaataaagatacgttaggctgggcgcggtggctcacacctggaatcccagcactttgggaggccgaggtgggtggatcacctgagctcaggagttcaccatcaccctgggcaacatgacggaaatactgtctctactaaaaatacaaaaattagctgggcgtggtggcgcacacctgtaatcccagctactcagaaggctgagacaggagaattgcttgagccagggagctgaaggctgcagcatgcggagatcacgccactgtaccccag[152 bp omitted]tgaaaccccgtctctactaaaaaatacaattagccaagtgtggtggcgggtgcctgtagtcccagctactcgggaggctgaggcaggagaatggcatgaacctgggaggcggagcttgcagtgagcggagatcgcgccactggactccagcctgggcaacagagcgagactccgtctcaaaaaaaagaaaaaggtattttagatactaacttcatgggaccagccaatgtgcacatctacaaaagtgcaaccctggagatcttcagttctcccttcaagccccatgagagaatcagatgtttaattcccacagatcattcaatgcacaatcactgcgtgcctactgtgtgccaggctccagcgcgctgagatggacgggtgcccatccaggaccggggaacagcccagaagccgcgtgcaacccctggcctcctccccagcacaaacgccgacccctgcgcgacggtccagacactggggccaccaccaaggcctgctcccagcctcctctctgccatgtctcagctcaccctgcacccccgccagggaccaggcccaagcccaggccacttgctctcctcacagctggcaaggcccggcccctctctgctcatcggtgaactccagactttatcccagcacccccagttcgtcccgacatccccccaccttttttttttttttgagacggagtctcgccctgtcacccaggctggagtgcagtggcgcaatcttggctcactgcaatttctgccttccggattcaagccatcctcctgcctcagactctgagtagctgggattacaggtgcgtgccaccgcgcccagcttatttgtgtatttttagtagagacggggttttgccacgatggccaggctggtctcaaacccctgacctcagatgtctgcccatctcggcctcccgaagtgctgggatgataggcgtgagccactgcgcccggcctcagctgctgttttctttctctctgctgtgtggcctgtggctgtcagcaacccatcgggtccgtttgttcccacagccccaggacagatgtgtctgagtgaccttgtttcaatcatggaaactgaggcacagagcacttgggacacactgctctgcggacctctcagccccaggtcccgccaacacatccaagccagtacttgtccctcctgagcctgtcctggcttgtgatgctccagccagaagtctggggacccccaccacagccccccacgccctcacctgccaagctgcctcctctcctggccacaggaactcgcttcctccaaagaggacctgcatcctctacccctcatttctgccgtccccaccgagcccgctgctgtctcctgcctggagtctgcagctgctactccccagcctcgctcctgggcccatccacggcgcgttccaccctcaatgcggatctggtcacactgggccacagggcctccctcactcctcctgctccggccttgccatggctcccacctgcccagcccctctgggctctgggccttccatccctgagcctggggcactgcactctccatcaacatcacttgctcagggggtcgttctggaccaggtcagtgccccctctccattttcaaccctcctgaaatgctaaggaaacacagatgacctttcaacaaggcaggcttcaactgcacaggtccactcatatgtgaattttttcaataaaggctgccccaacggtgccggcctctcctgcctccccttccacctctgccaccccggagacagacccaccctcctgctcctgctcctcagccctcaatatgaacacaaggacacaggccttcatcgtggccacctccactgtgtgaacagcaaacaggatttctccttttattttttttccttttttttttgagacagagtcttgctctgtcgcccaggctggagtgcagtagcgcaacctcggctcactgcaacctccgcctcccgggttcaagtgattctcctgcctcagcctcccaagtagctgggactacagttgtgcaccaccacacccggctaattttttgtatttttagtagagacggt[148 bp omitted]gggctggagtgcaatggcgcaatctcggttccctgcaacctccacctcctgggttcacgagattctcctgcctcagcctcctgagtagctgggattacaggtgtgcgccaccacgcccggctaatttttgtatttttgtagagacagggtttcaccgtgttgaccaggctggtctcgatctcccgacctcgtgatctgcccgcctcggcctcccaaagtgctgggattccaggcgtgcgcccccgcacccggccccttagacttttctgaatgtattttctgttctccagcctgttattgtgagaacaggaggctggtgtgcattgaccaagtgtcctcacaaggcctccggtcagcgagaagccattcctagttaagttcgtgggagtcaaaagttgtacttggatttgagctgagtgggggtccacgcccctaaccccgcatgtcgagggtccgctgtcccaggcccgcccaccttaccttgctgctatctcccgctgggcctcattgccctctcctgagccccccgggggcagacccctcacctacttttctccaaggggtccttgtcctgcctccatcttccccactttgcaaccgagccagcggtccctcaagtgcaatcgcatacatgtcccaaggtcagccggtgcccggggcgccccacctcccccctcaaacagaaagcctgggattctccagctgcacctgctgctgggtgagttccagctgcatccaacctaccccctccccaaagagcacaaagaccacccaggtggagggagcaaacccaccgcccctcactccaagctaggagaggcccagcagctaaggacgacagagacagggacggcgacacggacggcacaagccgtaggaggccccggaaccctccaggggcaggaacctctgctaagtaccgcccagggcaggaccccacgaaaggagacccagctgcccataaacacccaggaagaagccagaacacgttaacaaaagcacccgaaggtcagaagggagggcaggaccctccccctccagtgcccgcagcaagaaaacccagcccctgcccccgaccaatgaggggcagggtaagagggaccggggagtggagggaacctggggcctggggccggtaccccgcacactggcaaagacagatactgggccaaacccacttctttcccagaaaggagggctgggggctggggagggagggaccccggagctgggggtctctgggttggaagggcccggagatgggagtctgggcaggggtctagggtggtggcctggtggcaggggatcataggatggggtgcagggggtagcagggcccaggggagacaaccttctgcagagtccagggtccagagcctggcagtggcggagctggaggtgggtggtcactgaagtgggaggtggcagggcccaggggtctctggctgaggtgggggtccggggctggaggggctgtggatggtagtctatgatctggactgcagggcgggcagggggtatccctggaggggagcagcatggtttgaaggtctctgatccagatcatgtgctgagcctgggggtctccggtgggggtcactgggtctggaggcagcagggaggacgcagggagcaaggcctaggggtcttggcgcacaggggtgcgggtgggagtggcagggtccctggatggtgggggaagagggaggggtcttgtggtcatgggtgggggtggaggaaatagcacgacccctgaagggaggggtcctggagttcaggagtcataggttgggggttacggactgaggtggtgaggactggggacggggggtctcaggtgagagcggagaagtctctccatcctgggatgcaggggtgacacacttgagtgtagtggggtcccagggggccccgggagtagagagtggaagggcagtgggcaggggtgaaggacctggggaaggaggggtcctggagagtccctgggtacagggacggaggggtcaccagtaggggtcccagggggagaggggcggcaggcaagggtgcagggcctggggatggaggggtcctgaggatccccgggtatagggatggaggggtgtggcatgtggggtcatgggtcctagaaacagtgggttggggtcctgggaatggaggagcagataggggtacacgtcccagggttggagggtcacaggagtcccaggggtggtgggtgggggtgcagggccagggcatggaggggacccagggatgcaggccaggtggggtccagggatggaggggcctggggtgtaggcaggggttccagccggaggtggaggggcccagggatctgggggcagaggtgtctggggacctggggtgcagggaggggtgaggtccagggatggagcgtcctggggatggaagaatggagggtcctagggtgcaggcggggggtggagggccctgaggatggggtattcagggttctggggtgcgggctgggtggggtttgaggatggaggggcccaggggctccaagtgcaggccgagttggagggtcccaggaacggagggtaccggagtgcaggctgggtgggtccagggacggaggagagcaggggtcccaggggtacagggcctgggatcccggggaacaggctgggggcgcaagccagaggtggaggatccaggggggcctggggatggaggggtgcagaggcccagagtgcaggcctggtggggtctggggacagagaggtgcagaggcagggacagaggggtgcagagcccagggaactgggtggagtctagggatggaagggtgcaggccccggggtgcaggccgggtcggtttcaggaccggaggggtgcaggggtcccagggacagaggggtgcagggcctcaggtgcaggccccggggtgcaggccgagttgggttcggagcctgaggatgcaggggtgcaggggtcccggggacagaggggtgcagggctcggggatggaggggtgcgggggtctcggggacagaggggtgcagggcctcaggtgcagggcccgggcagcaggctgggtgggtcggggccagggctggcggggtcggggcgcccacctgtgcgcggggatgcgctgcgagctgagccccttgcccaccaggaagtgcacgtcgcacagcacctcgttgttgaagaggaaggcgaagcgctcctgcacggtgggcttgctggcctgccagttgtacgcggcctcgcgctgcagcgccgccgcccccgggcccgccgcctcctccgcccgctccgcgcccgcggcctgcgcgtctgtcccggggcccggcggggcgggcggcgtcggcccaggggcggcggcggcggcggcggcggcggcggcggcggcggccgcgttgccgggggccggggtggcggcggcgttggcgctgggcccgggactgccccccgtgcccgggccgaccccgacccccggcgggcacgacgcacgcccgccgctcccacccgccgccattttgtggctgcggcgtgggcgggggaggggaggagggaaggagggaggggaggagggaaggagggaggggaaaggaggagagtagggggaggagggggaggagggaggggaggggaaaagaggagggaggggaaaggaggggaggagggaggggaggggaagcgggaaggagggaggggaggagagggaggggaaaggagggggaaggagggaggggaggagagggaggggaaaggagggggaaggagggaggggaggagagggaggggaaaggagggggaaggagggaggggaggagagggaggggaaaggagggggaaggagggaggggaggagagggaggggaaaggaggggaggtgggaggggaggagggaggggagaagggaggtgaatgggggaggctgttgcaggggaggggacggggaggagagggaagagtaggaggggcctgtagaggggaggagctggtggaagacctcttgctccactccctaagcatcctgacctgaagcccagactccagaccgaggtccagaatttggggtccaggcaccaggccccagactccagaccgggaatcctaaaccctggagcacagacctcagtccgggatcccaggcctcagaccttgaatcctagatcccagactctgaaccccagacttcagactccggattccagatcccatacctcagacccggaacccccaacccaaagaccaagcgcaaactccagaccccagaccccggacccaggtggcgggcctgctccgtggcgcaggctccgctgtacagagacatagcctgaggccgggaagctgcggatgagcgagcaggatgcaggccacgtgcactgacactcagcagacgcccagcaccctctccaggccaggtgtggggggtggtcagtgtggacggagctgggactcccccaaaacgcttactacatacataatgtcaaggtagacaaatgccacaaagattgaggaaccaggtcgggcgcagtggctcacgcctgtaatcccagcacttcaggaggccaaggcggggggtgcatcacctaaggtcaagagttggagaccagcctgggcaacatggcaaaa[134 bp omitted]gtgaaaccccatctctactaaaaatacgaaaattagccaggcttggtggcgggtgcctgtaatcccagctactcgggaggctgaggcaggagaatcacttgaacctgggaggcggaggttgcagtgagccgagaccgcgccattgcactccagcctgaacaacaagaacaaaactccgtctcaaacaaacaaacaaacaaacaaaacaaaacaaaaaaaaaactaggcgtggtggtacgcacctgttgtcccagctactcagaaggctgagacggaagcatcacttgagcctggaaggttgagcttttgatgagctatgactccaccactgccctccagcctgggcaacagagcaagatcctgtctcgaaaaaaaaaaaaaacaaagaagaaaaagaaaatagggtattaaaaaaacccaagtgataatgctattttcagttctccagagtgggtggttgaggtagttacaatttttttttcttttttcttttttctttttagagtctccctctattgcccaggctggggtgcagtgatggcgatcttggctcactgcaatctcagcctcctggttcaagcaattctcccgcctcagcctcctgagtagctggggttacaggtacccgccaccacgcctggc[135 bp omitted]gcctcccgagtagctggaactacaggcgcctgccaccatgcctggctaattt[132 bp omitted]acaacctccgcctcccggattcaagcgattctcctgcctcagcctcctgagtagctgggattacatgcaccaccacgcccggctaattttgtatttttagtagagacggggtttctccatgttggtcaggctggtctcgaactcccgacctcaggtgatccgcctgccttggcctccccaagtgctgggattacaggcgggagccatcacagccggcctctaaatgtcaactttcttatctctcatctcatacatttgcaaagtgacatctttccagccaaatcctaaagaggacatctgtgcagtcccttctagatgaaggtgcagaacaggcatacctgccatggtgacagaaattaacaaaatggtaggttgtctgaggaaagggtgaactttacggaatgctgagatgttcacgattttttttttttttttttttttttttttttttgagatggagtctcgttctgccacccaggccagagtgcagtggtgcaatctcggctcactgtaagctctgccttccaggttcatgccattctcctgcctcagccccccgagtagctgggactacaggcgcctgccaccatgcccggctaattttttttttttttttgtatttttagtagagtcggggtttcatcgtgttagccaggatggtctctatctcctgacctcgtgatccgcccacctcggcctcctaaagtgctgggattacagatgtgagccaccgcgcctggacttttttttttttaaagagctgtaggccagccatggtagctcacgcctgtaatcccagcactttcggaggccgaggcaggcagattacttgagttcaggagttcgagaccagcctggccaacatagtgaaaccctgtctccacaaaaaaatacaaaattaacaaggtgttctggtgtgtgccggtagtcccagcttttgggaggctgaagtgggaggatggctacagctggggaggctgagattgtgccactgcactccagcctgggcgacaaagtgaggccctgcctaacacacacgcacgcgtgcgcgcacacacaggcacacacacacacgggatctcactttgtcgcccaggctgctcatgaactcctaggctcaagcaatcttctcgctaggcctcccaaaacgctgggattacaggtgtgaaccactcggccatgtggagattttttttttttttttttttttcttgagacagagtcttgctctgtcgcccaagctggagtgcagtggcgcgatctcggctcactgcaagctctgcctcccgggttaacaccattcttctgcctcagcctcccaagtagctgggactacaggcgcctgccacc[131 bp omitted]caccgcacccggcccatgtgattttgagaggggtgtgagtgatacaggttcatgcatttgcctaaattaaccaaactacgcttaagatttgtgcattcgctgtaagtaaaccatacctctcactagacctaaacatattacggatggagattatctatgaaggcagaaacatgagtccacctcagccctagggctggcaagggaagcttgcggagcctttttgtcctttgtcagtgcttttttttttttttttttttttttttttttttttgctggctattgagccaacacctgcccctggcagtgcgttttgagcgtttttgagttttccccgggtttctggaaccaatcccagccctgtctatgcggtgatggcgtctagagggcgctcgtcaccaagctgattgctggatttccattcatttccagagaagtgtgcagttcacataatagaaccatccttggccaggagggtgggatgtcatttcttccctcccacggtcccctttcctcttctctgactccaggacactcaggctggctggctttctttctttggctggcttgctttctttcttgttcctttctttctttcttttttccttccttccttccttccttccttcttttttctgcaaagtctcgctctatcttccagggctggactgcaatggtgcggtcacagctcactgcagcctccacctcctgggctcaagtgatcctcccgcctcagcctcctgagtagctgggaccacaggcgcgcaccaccatgactaatttttttttttttaaagagtctctcgcggccaggcgtggtggctcacacctgtaatcctagcactttgagaggctgaagcagg[132 bp omitted]ctgaggcaggagaatatcaagaactcaggaggcggagcttgcagtgagctgagatcatgccactgcactccagcctgggcaacagagcaagactctgtctcaaaaaaaaaaaaaagtctctcgctctgttgcccaggctgaagtgcagtggtgtggtcttagcaaactgcaacctccgcctcccaggttcaagcgattctcctgcttc[134 bp omitted]gcctcccaaagttctgggattacaggcgtgagccactgcgccagccaacactgggactcactcaggaatattatgcacaccagaaaggcctgatgtggaagaaaatatttaaagggttcacaaaaaaatttagagggagcaactgaaggagattagaatatgccatgtcaaaatatgccaccttaggagccgggcgcagtggctcacgcctgcaatcccagcattttgggagactgaagcaggtggatcacctgaggtcaggagtttgaaaccagcttggccaacatggtgaaaccccatctctactaaaaatacaaaattaaggccaggcacagttgctcatgcctgtaatcccagcactttgggaggcca[132 bp omitted]tgaggcaggagaatggcgtgaacccgggaggtggagcttgtcgtgagccgagatcgcgccactgcactccagcctcggtgacagagtgagactctgtcccaaaaaaaaaaaaaaaaaaaaattagctgggcgtggtggcacacacctgtaattccagttactcgagaggctgagccaggagaatcgcttgaacctgggaggcagaggctgcagtgagccaagatcacaccactgcaccccatcctgggcgaaagagggagattctgtcttatgagataagagaagataagataagatgatgggataagccaagcctcaggaggaaataaagaagagacctttggattgaattgtgaccaggacagaagggggcatgtcaacccctctgtctcactgggctctccttgcccttcaagtgctggccccaagtccccttctctgcaagccctgcccaccagcccctctctctggctgcagagaaaagccagtggtggcagacgcctggggacagccatgtcctggccacctggcccagccccaggctggggcaaccagtgaggctcttccttgtggatttcaggcactctcattggcaatgaagtgctgtgtgcttagttccttacggctgtgtcacctgaacagttctgcccagtgagttatgaacagaagaggtgtgactcttctagcctgtagcatttaatggccagggcaagaccctccagagacctctcctgtgtgctccattggagatggtggctgtgagccaggagtgaggagatgtgggcagagccacagccacccagcaaaagagctggaaagcaacctgtgcgtgctttatacttcattttttgttgtagtggtaaataaaatacacataatgtaaaatttgccttcttttgttttgagatggactctcaccctgtcacccaggctggagtgcagtggcgcgatcttggcttactgcaacctccgcctcccgggttcaggtgattctcctgcctcagcctcccgagtggctgggattacaggtgtgcaccaccacacccagctaatttttgtatttttagtagagacagggttatgtcatgttgcccaggctggtcttgaactcctgggctcaagtgattcttcccctgtcttggtctcccaaagtgctgggattacaggtgtgagccgccacacctggccggcttgcttgctttctcttttttctttctttctttctctctttctttctttccttccttccttctttctttgtcttttctttctttccttcttgtcttttttctttcattccttccttccttcctccctccatccctccctcctttctctctctgtccttccttcctccctctctttctttctttttcctttttttttttccctgagacagggtcttgctctgtcactcaggctggagagcactggtacaaacatggctcacccactgcagccttgacttcctgggctcaagcaatcctcttgactcaacctcccaagtagctgggaccacaggtgcacaccaccacgcacggctaattttttttattttttgtagagatggagtttcaccatgttgcccaggctggcctcaaactcctgggctcaagtgatcctcccaccttggcctcccaaagtgttgggattaccggcgtgagcctcggtgcccggcctcacatgttaagtcctttcaggagagtgaggtgtgtgcagataaaccagatcccaggcgggcgtctcccacttgaagtctaaatgatgctgcctgaacacacccggtggtagcttgcttccaagaaggcagctgttggtttcttccctcccatgaggaggctgagttcattcttccagctccttgaatctgagctggctttgaccaagagaagatgatggaagtgactgtgccagtccctggcctcaaagttcctgcttcctttctccggggtcacttgtgcttatggaagccacatgccatgcaagagatgtgactgctgagcacggtggctcatgcctgtaatcccagcatgttgggaggctgaggtgggtggatcacctgaggtcaggagatcgagaccatcctgactaacatggtgaaaccccatctctactaaaaatacaaaattagccgggagtggtggcaagcacctgtagtcccagctactcgggaggcttaggcaggagaatggcgtgaacctgggaggcggagcttgcagtgagccgagatcgcgccactgcactccagcctgggtgacagagcgagactctctcaaaaaacaaaaacaaaaattagccaggcgtggtggtgggcacctgtaatcccagctgcttgggaggctgaggcaggagaattgcttgaacccgggaatcagaggttgcagtgagctgagattgtgccattgcactgcaggctgggtgacaagagcaagactccgtctcaaaaaaaaagagagatgtgaccacctcactgtgtgtgaaaagccatgaagggtggaacatgccagccatgaaaacagagagaagccagagagcacagaggggttggacgtgtgtgaagaagcccccttgttgggaggccgagatgggtggatcacttgaggtcaggagttggagaccagcctggtgaccatggcaaaacctcatctctactaaaaatacaaaaaaaaaaaaaaggccaggcctggtggctcacacctgtaatcccaacactttgggaggccgagacaggcagatcacaaggtcaggatatcgagaccatcctggctaacacggtgaaacctgtctctactaaaaatacaaaaaaattagctgggtgtggtggcaggtgcctgtaatcccagctacttgggaggctgaagcaggagaatggcatgaacccgggaagcagagcttgcagtgagccaagattgtgccactgcactccagcctgggcgacagagcaagactgtctgaaaaaaaaaaaaaaaaaaaaaaaaagccaggcatggtagcacgtgcctgtaatccaatcttcccatctacccaggaagctgaggcaggggaataatttgaacttgggaggcagaggttgc[132 bp omitted]cttcccagtggcctcagccaatgctgcgtggatcggagacaaactgcctaggcaggatgaaccacctagctgagcccttcccaaactcctgacccacaaaatcctgagcaaaataaaatggttgcttttgaaaccacccccgttcggctgacacaaattgcatgctaggttctggacagagacacaggtagaaataagcatgacacaggctgcgctctggcccacttctttggtgctaaaagacatggagcactggattctgagcacttgcatcctgttgttcctatagaaaggatttctgctgttaggactctaagactgtttaagaattgatttggggccagg[138 bp omitted]tggtggtgggtgcctgtagtcccagctactcaggaggctgagacaggagaattgcttgaacttgggaggcagaggttgcaatgagccaagatcacgccactgcactccagcctgggcaacagagcaagactgtctcaaaaaaaaaaattgatttggggtcaggcacagtggctcatgcctgtaatcccagtgctttgggaggttgagtcgggggatcgcttgagcccagggattccagaccaccctggggaacatagcaagcccctgtctctacaaataattttttttttttg[131 bp omitted]ccaagacgcctggctaattttttgtatttttagtagagatggg[148 bp omitted]tctctctctccttccttccttccactctctttctttctatctttcttcttccttttttttttttctgagacagggtcttgctctgtcactcaggctggagagcactggtacaaacaaggctcactcactgcagccttgacttcctgggctcaagcaatcctcttgcctcagcctcccaagtagctggcaccacaggggcacaccaccacgcacggctaatttttttttattttttgtagagatggggtttcaccatgttgcccaggctggcctcaaactcctgggctcaagtgatcctcccaccttggcctcccaaagtgctgggattacaggcgcgagccatcgcgcccggcctctacaaataatcttaaacattagctggaagtggtgtcatgcctctgtggcttcagctacttcagaagctaaggtgggaggattggttgagctggggaggttgaggctgcagtgagctaagagcaggccactgcactctactctgggggacagagccagaccttgtctcaaaaaaaaaaaaagaaaaaaaaattgattactggatctctgatgttagactcataaaacttttttttttttttttttttttgagacagtctcactctgtcactcaggctagagtgcagtggcttgatctcggctccctgcaacctctgcctcccgggttcaagtgactgtcctgcctcaacctccagagtagctggaattacaggcgtgcaccacaaggcccagctaattttttttgtttgtttttgtatttttagtagagacgggggtttcaccatgttggccagactggtcttgaactcttgacctcaagggatcctcccagtgcggcctcccaaagagctgggattacaggcgtgagccactgcacctggtgcctatattttcattctggaaactaaaacggttcctgatacacagtataccaaatatatgtcacttcctttatgataggagggcaggaggaagggagagaggaaaagataaagagagtgaaggaggttgggcgcggtggctcacacctgtaatcccagcactttgggaagcca[136 bp omitted]gaggcaggagaatcgctggaacctgggaggcagagtttgcagtgagccaagacggcgccactgcactccagcctgggcaacagagcatgactccatctaagaaaaaaaaaaaaaaagaagacaggaggagcccctatcctggtacagtgagcccccccacacaccccattttacagatggccatggtgaggcccaggtggagagaagcccgggctcacatggaaggtccggagtccggagtccggagtccaggttaggaggcacggccagagatcgccgcccactcagcctcctggattgcacggttcagtttgatgcacttttatttccaagaacaaaggataaagggactgttattaaattataccaccagtgccctgctcaagcacacacaccagacacacacacacaccagacacacacacacaccagacacacacacagggccacaagtgaaactggccaggtctggctgggtgtggtggctcacacctctcatcccagcaccttgggaggccgaagcaggtggatcacctgaagtcaggagttcgagatcagcctggccaacatggagaaacccgcatctctactaaaaatacaaaaattagccaggcgtggtggtgggcacctgtaatcccagctacctgggagactgaggcaggaaaatcgcttgaatccgggaggtggaggttgcagtgagctgagatcacgccactgcactacagcctgggtgacagagcgagacgccagagtgagagcgagagccagagagagagagagagagagaaagaaagaaagaaacgggccaggtctgaataaagtggatgaattgtatcaatgccaacagcgtggttatgacattgtaatagactgttgcaaaatgttaccactgggggaaactaggcaaagtgctatttcttataactgcatgtgtttccaatcattacagcaaaaaattcaattacaaaatatatatattttttgaaacatgatccaaagtgcaggggcgtgatcacagctcactgcagcctcaaactcctgggctcaatcctcctccctcagcctcctatgtagctgggaccacaggcaggcaccaccacacctggctaattttttatatttttagtagagatggggttt[144 bp omitted]caaaaggtgctcacaaaagggaaaccgaggcagggcatggtggttcacacctgtaatcccagcactttgggaggccaaggcaggaggatcacttgagcccaggggctccagaccagcctgggcaacataatgagaccccacctctaaaaaaaaaaattacaaaaattagctgggcctggtggcgcacacctgaggtcacagctactcaggagactgaggtgggaggatgatttgagcatgggaggtcaaggctgcagtgagccatgacagcaccactgcactccagcctgggtgacagaatgagacctcatctcaaaaaaagggaaactgaggcaggggagcgctggagctgttgccctcacacttcacgcggggaaactgagtctccctgggggtggcgggatgaatgtaccccagggcatcttcccgaggctgcccacagaccccaagccctgcatggcagggagtgaaatgttagcttgatagaaggaatgaagacagccagaaatggaatgaacagggcaggcaccaccggggagtcagtgaggttccaacccaggggtgccagttctatccggccacccaaaccccaggtgggaacactcgtatcagcgggacccccagctcacccaggcttccccgacacagggagctggccctcccaccctcccttcctctctccccaacgcttaccccatcccagctttgaccaaggaggtaggtccttcctcacgtctgacttgattccatcacacttcactttaaacaggtttctcattcttcagggtgagtcagagaccaggacaggccacagggttgcctttggcaaggggacaattaaaggccagaatgaaaggggctgatccagcaggagggatccctgtggttagtgacaatggcaggaagtaaaatttgtgtgagtccttttatgctgcagagggaggagagacatcctgctggccttctcccagtcct[133 bp omitted]ctgcctcagcctcctgagtagctgggactacaggttcccgccacca[184 bp omitted]ggtctcactgtgttgcccaggctggtgtcaaactcctggcctcaagcgatccactggtctcagcctctcagtgttggaattacaggcatgagccaccgtgcccggccattattactattattaattgagacagggtcttagtttgttactaagtttgttacttagtttgttactaagtttgttacttagtttgttacaggctggagggcggtgatatgatcatagctcactgcagcctcaaattcctgggctcaagggatcctcctgcctcagcctcccgagtagctggaactacaggtatgtgccaccacacctggctaatttttgtattttttgtagagatacgggtctcactata[135 bp omitted]gtggctcacacctgcaatcccagaactttgggaggctgaggcgggtggataacctgaggtcaggagtttgagatcagcctggccaccatggtgaaatcctgtctctattaaaaatacaaaaattagccaggcatggtggcgggcacctgtaatcccagctacttgggaggctgaggcaggagaatcgcttgaacctgggaggcggaggttgcagtgcgccaagattgcactactgaactccagcctggtgacagagcgagactctgtcaccaaaaaaaaaaaaaaaaaaaagaccaagtgcggtggctcacgcctgtaatcccaacactttgggaggccaaagtgggtagagcacttgaggtcaggagttcaagaccagcctgggcaccatggcaaaaccctgtttccactaaaaatacaaaaattagctgagtgtggtggcgcatgcctataatctcagctacccagggggctgaggcatgagaatcgcttgaacccaggaggcagaggttgcagtgagccgagatctcgccactgaactccagcccgggcgacagagcgagactccgtctcaaaaaataaaaaaataaaaacgatggcactgtgaacgggtctgttgactatttcttggtctcttggtttatctcctcccagctcaggcttgctcctcgccacagtggggctcaaggcagttgcacctcggcacaattttctttttttttttggagacggagtcttgctgtctcccaggctggagtgcagtggtgcgatctcggctcactgcaagctcctcctcccgggtttatgccattctcctgcctcagcctcccgagtagctgggactacaggtgcccaccaccatgcccagctaattttttgtatttttagta[133 bp omitted]cgtggttttagctttttctggaaaatcgacttaatccgcctaccacagccactctgcttcctgtaaggccactttccctgggttcagagagagtcctcgctcctctagcgctgcctcactttgt[140 bp omitted]cccatctctactaaaaatacaaacaattagccgggtgtggtggcgggcacctgtcgtcccagctactggggaggctgaggcaggagaatggcgtgaacccggcaggcggaggttgcagtgagccaagattgcaccactgcactccagcctgggtgacaaagcgagactccatctcaaaaaaaaaaaataaaaaaggctcttggggccgggcgcagtggctcacgcctgtaatctcagcactttgggaggccgaggcaggcggatcacctgaggtcgggagttcgagaccagcctggccaacatggagaaaccccgtctctgctaaacacacacacgcgcgtgcacacacacacacacacacacacacacagaaaaagttagctgggcgtgatggcctgtgcctgtaatcccagtcactcagaaagctgagcaggtgaatcgcttgaatccgggaggtggaggtcgtagtgagctgagatcgtgccactgcactccagcctgggcaacagagggagacgtcgtctcaaaaagcacctgtgttttcggaacattcaccatgtttgcaggagcactattggcacggaaaaaaaaatgttttgttttgttttgttttttctttttgtttttgccagagtcttgctcttgttgtctaggctggagtgcagtggtacaatctcagctcactgcaacctccgcctcccaggttcaagcgattctcctgcctcagcctcctgagtaactgggattataggcgcccgacaccacgcccggctaattttttgactcttagtagagacaggg[136 bp omitted]gggtttcaaagaaattgtgaaggtcacagggtttccgcacagtccacaccccacacctggtttctctgacaatctgtgtggtgcagtagcatgtgctgctgtctttttaaaggatccccgaatcactgctgcaatgtagaggtgattttgccatgaaggattcagtttgctcccacccctgacccggtgggacacgtgggcagaccccggcccgggcacctgtgcgccagagctggtggttcccttcacagaggggcagactgggctctggaggctgggggtggcctcggtcaccgcctgtgaaaggctcccagttcctccagctccagaattttcctgccactctacaagaagagactggaagagggcgggactggcagagaggaaaccacaaaaacaggattgagagcagcagctcagaagacaagctgttcctggcaggcggccgggggcaggcagcggtcagcgggggggcctggcagggctgggcggggctcggtgccacccgggagggaagtgacttggcctatggcacctcccacacttcctacacacaagccaggctgggcaagggacaagggcaacaggccagggagccctgaggatggccgggtgggggccgtctgtgtgccttcattcattcattcattcaatctgttatgtgcgagttcacaaactaggacaaaggaggagacagctgagctcagcccaccttcaagggtggcagatgagtaacccagggcgaggaacattcacggatggtcatgcggctgcaacacggcccgagctcctagggagcacctccagaagtgatcccagatccgggggctgaagggtgcagaggagaaaccaggtgcagaggatgttggggaggccccgctggaagggggagcaggtgcataggcccggcatccagaaggagctggggctggagaaactgagaggagggcagagtttgagggggaggcttgcaggctgggtactctgagccttgaactcctgggctcatgcaatcctcccacctcagccttccaaagtattgagattacaggtgtgggccactgtacccagactaaataaaataataataattattattattatcattattattattattattattattagaacctaaactaggtgccagggcagccaagagcactttgtttttgtgctgtgggcaatggggagccatgggaggtgttagagtaggggtgggctgtgattggttttaagtcactaggagaaaagaggcagaggcaggaatgggggctagaaggtcagcaaggagtctggggccttggcctggggtagcagtaagggggaggacaaaagtgggggtgattttgagaggagacttgggagttgagattcaaagggtgtgatggggggaaaggaggagaagacagggaagaccaaagccagagagaagagagaccctagggatggggctgaggagagagagccgtccccagctcggatgaggctcagacaggttggccgcagcacccagagaaaacctgggagctgggaccctctgggtttctgggggctgccactgtccagggtagaggcctggccaggccccaccctgtggtcatctggcccagccctctgttttccagatggggaaactgaggcccaggttggcagtcatcttgccagccccatagccccttttccaggggacagctcggaacctcgatttccagtctgtgccttgaggctgtgggggaagctaacggaggaccctgagcccctccctcccactgcagctgcagaacagggctagaaggacttcatgggtcatggggttcagtcgggactgtggggtagccacgaagtgccctgcagggggtgacagacccccggtgcccggcccacccttcacctcccccagcagttagccctgcagggctgggcccgtcctggccatggccgtggtctctgctccacctgggtctccccggacccttcctcctctaggcccagctggaatccaccacccccggggccattcacatgaaaagtccagaacaggcaaatccccagagacagagagtgcactagtgaccaccgggggctggggaggtggggaaaggcagtgactgccggtggggcgggcttgctgttccgggtgatgagaatgttgcagaattggattagaggcgaaggctgcacaactttgcgtgtgctaaaaccattgaattttagacgcagtgggtgaacagcggtgctgaggtttttttgttttgttttgttttgttttttagaaagagtctcgctgtgttgcccaggctggagtacggtggtgcaatctcggctcactgcaacctcagcctcctgggctcaagcgatcctcctgcctcagcctccctagcagctgggattacaggcaactgccaccacgcccggctaattttgtatttttagtggagatggggtttcaccatgttggccaggctggtctcaaactcctgacctcaggtgatcctcccgcctcggcctcgcaaagggctgggattacgtgagtgagccaccgcacccggccaggtgctgagttttatcacagtaaagctgttatctgaaaaaataaaatgctgcctgggttccctgttgcctttggggtgccgccccctccccggccgtggtcgggtgtgtccccacacggtgcttactctcgcgctccagcctgtcggtgtgcaggtaccataagcttccttcacctcctcacgccttctcccatgcaggctcctggggcagggcagggaacccttccgtcccgagcgccatctctcttgcctccagccccctccaggcccaaaccccgcccctccagaccgcaagccccgcctttccaggcccaaacctggccccagacacaagcctcacccccacctccagttcataagccccgctccctccaggcaaaagctccgccccccaggccataagtctctgccttccaggcctcaaacctcacccaatacacaagccccgccccgtctgggaacctcccccaagcctcgcccctccaggccccaaacttcgccccagacgaggccctaacccttcagattccaagctccgcccaccaagtccaaggctccgccccatataataagccccacccccagacgccaagcctcgccccctccaggcctcaagtcccgccccctcaggcgacgtcatcggtttctttcttgctgggttttgtccctgcactgcgctaccagcctgtagctcacctggctgcccttggctcccgcttgatgaatccggaaactgaggcacacagtagcctggatacagctgggatttcagcccaggctggcctccttaaccactaggcttcgctgtcctccttccgctcccgcctccaggaagcccttcctggtctacacccaactccaggatctgaggtcagcccttggccgtccagctcatcttctctgccaccagccccagcacagcgtcctgcctgcaacaaaaacttaataatggctgaggggggtgaaccctaaagcaggcaggggccggccatgtgcagaaggttacaattactaggacttgttaggttgcacagtcccaaggcagcggcaacaacgtctctcaccctctcccaggaggagacccttccccttcccttgaacctgggcgggcctcgcgtcttctgtgaaaccagagaaggtggcgggggtggcgctgcctggcttctcagcaggtcagcctggcagcttctgctttgtttgcttggaaccctgcttactggagcccgagcttgggaacacagctgccatgttgtgaggaagcccaagccacacggggaggctccctgcaggcgctggccctggtgaagagctcgcagctgagccctgactgggtgtggtggctcacgcctgtaatcccagcacgctgggaggccaaggcagctggattacttgaggccaggagttcgagaacagcctggccaacataacaaaaccctgtctctactaaaaatacaaaaaattgacttggtgcggtggctcacgcctgtaatctcagcactttgaggggccgaggtgggcagattacctgaggccgggagttcaagaccagcctgaccaacgtggagaaaccccgagtctactaaaaatacaaaattagctggacgtggtggcacatgtctgtgatcccagctactcgggaggctgaggcgggagaatcgcttgaacctgggaggcggaggttgcggtgagctgagatcacgccattgcactccagcctgggcaacaagatcgaaactgtctcaaaaaggaaaaaaaaaaaatacaaaaaattagctgggccgtggtgacgcacgcctataatcccaaactactcgggaggctgaggcaggagtatccctgaactcaggaggcagaggttgcagtgagccgagacatggcaccactgctctccatccagcctgggctgtgaatgagattctgtctcaaaaaaaaaaaaaaggacagggtctcactctatcacccagcctagagtcagtggcatgctcacggctcactgcagcctctacctccttgggctcaagttgtccaaccgcttcggcctcccatgcagctgggactatgggtgtgcaccaccacgcctgggttttttttttttttttgagatggagtcttgctctgtcacccaggctggagtgcagtggcatcgtctcggctcactgcaacctccacctcccaggttcaagcaattctcctgcctcagcctcccaagtacctgggactataggcacccgccacctcgcccggctaatttttgtagttttttagtagagacagggtttcc[144 bp omitted]tggagtgcagtggcatcatctcggctcactgcagcctccgccttctgggttcaagcaattcttgtgtctcagcctccagagtagctgggattacaggcatgttgcaccacaccgggctaatttttgtatttttggtagaggcgggatttcatcatgttggccagacctcgagtgatccacctgccttggcctcccaaagtgctgggtaattacaggcgtgagccactgctcccagccgagctcagctttttgcctgtcttcccagcagtgcatccaggcatcctggagcagagacagaccccacaggagcgcaccccctcaaaactcctgactcagcatcaccagcaacaacgtggttttgcaccaactggttgtggatggctccttatgcggtgacagaaaactaaaactcaggcacacagcaagttttttgacttttattaaatctttacaaaacagaatacaaaattccggcattgacagttggtgtaaaggaaaacttctgagctccgtcagttcacctggtacattggaattaaagtgcttggatgtttttcccccactttaaaaaaacttttgaggttttttttttttttttgtcttttaaaaacatcgtaacattaacacatggccgttcaccgtcccccagcgatgggagctggcctggggcccagggtcctccaggatcttcactcattcacagtaacggttctgaccagtcctccaggtcgcacgtggatgcgacaggggtggggagggaggaggaagtgactgtcccaccttcagaaaaaaaaaaaaaaacaaacaaacaaacgctgctagccactcagctttagagacccgatggctatgggcgcctgcagcgggcgggggtccatttgcttgttctttgatacaaaaaggcagagaatcccccgttacgaaacatggaatcactgacaggcgagaagtgatgggggaaaggggtgggcggaatgccccaccccccccaggggtctttggaaggggcagtccacagatatgggcagtggggaccagggaaggcagagcacccccacggccaccggactgtgaccatcatacgagattcaggaggggcagcagggccaggcagacggtctccgaggcccccacccccaggccccccgacattcaagtattcttcaagaacagggaagcaaagtccatcgatgtgttgtttttttttaaggaaaaactaaaaaactaaacaggaggaagaatcccgaccgcggatttagaagccagaggggctgccccagctgtggagctcgggggctgcgccgggaagggcgggcggtgaccctagccgcgcgcacttctaaagtggaaccctgtattgcatagaacgtccccacccgcggggagggggcagcaggctccgcagcccccgggggttggagcatggagggtggggggactgagcagacccccgcattcctgggtgcccgaagggaggccgaggccgcagccgttttcctgaaggtggcagaccaaaaacactgccctgggggtgaggattcggccagaccccggggtctgggctcagctctaaggacaaggacggagctgacggagcttccaggtcaggcccgaggggcggcgcgaggcaggacgtggctacggtcagactgagccctgagaaggggcactcgggtgccccaagggggtgtcttcaggaccccccacattggctgacagtgcctgtccagcccctctgcctgctgcggtggaaacggcttcgggccaggcggggctcctgctgtctcaggccttggtgtggaggggaggggcagcggcgagcccctggggtcagctgcagtttaaggtcaaggtcggaggccgaatctggccaccaggagtcctggacagacagacgggccttgcaggaagccccgattgtcaactatcatggggacaaggcaggcgcgggtgaagggctgggggatcccatggggtgggtgggtgagctgcctgccacctgcctgcctgacacctccagagacaggcagcccctcccttccccaaccaagccaccaggggtgctctcagggtgagggatagaggggaagagcctgtccctgaaatactgcgggctgggagggaacacgagggcagggtcctgtgcccctccccagctctgcaagatggcaaacgctgtgggcctgctctcctgagtcactgcaagccacgtgggcagatggcgggcagcacaggtgacctgggggcaccttcatagtagaggtgagcagggcgggggaccggggaggggacaagcccacccacctaccctctgctcaccttcccgggtgcctgcaatgcttttaaccatccaaaggaaaaaataacggggaggggtggaaacaggaaaaaaaaaacccaaaagcaaaaaccttctataaaacacccccctcagctgagcttagtgcctgggaatccaggcagaggaggggcagcccgctggacaccggctggcgatagcttaaaaaacctttagatttgattgggggacgggtgacctatgtacagaggggagatgggagggtcaggcgtggtctcccaccaggaccactggggccgaggacagactggccctttgccgccgctgcgccagcttggactgggagggtggagacagctgcaggcagcgtgaggtagctcggaccaggacgggctggccctgccccgcggcctcctcctcagccaggtcctcgtcgtgctgggccagctgccggttcatggcaatggcctcagccgcgaaggacgtgaggtctttggcacagctgttcctgggaaacggggtgggggtaggtggtcaccaagaggcacccctcaggggacccctggggtctgtgaaggccctgggggaaggggcttcatgcccccctcccagcccccaccctggggctcctctgagcaccagggccccaccgggagcttcactgagtcaccaggcttgcctgcctccccgaccccaaagcagttctccgggtctttcacaaatgtcttaacctggaaaccccgccccctggactcaggggtcccgagcacccctgcgggccttacctctgcaggaccatgggagtgggcaaggtgttctccggggcgcactgcaacgagagtgggcgggggcagggctggagagcagctggggccgcctggggcgctgggtggggtgtctggccaagggatgccatgcccatcccatcaccaggaccccaccggagaccaggagtgcacctgggtgccccgggagccaagcgcccaccccgaggtccctatggtgaggctccatgtccccctgcccagggaacccgaggctgggccaggctgaggcctggtgttacaggacccagtgagggtgggggcagagccccaagccccatctctcccggctgttcccagcccaaacccacctccgcccccctcttaacccatgggtctctggatgcttctgcaaggagattggaggcccccagcccctcgcctggggacacagagtgaccccagcttctatttttagtaaatcctcactccctggggtggcagctcagctcagatgacctctggcaggagaaacacccgactcctcctcgactggaggccacacagggaagggtggaggcacagcctgggcttgagactgacggcaggctaggctggggtctatgtgagctgggctcgctgcccgcttcgctccagcctgctgcaggctgtgggtccccaccaccctccaggaaggttctctgagtagctgctcctgggagccgcctggctggccagcgggcaccgtgcacaggcgggcggtggggatttcggctgcacccctcatcccagggcagagcctgtgctctcaagcctcagtgcatctcagggtgtccaggctacaccctcagggcttcccatgctcgctctgaggccaccctgcagcgcccccatacccctcctgccgcccgtgcggctggtactcaccccctgaacccaggggtgctgcaggacttgggcggcactcagcctctgcttggcgtcacggaccagcagcttggagatgaggtctttggcagcgcaggagatgtgggcccagtccttgtcggggaactcgtacttgccctcctggatgctctcaaacagcatgttctggggacatagaacacaggggagcttagacctgcccaagggcctggatactgtgcactgacacgtggctccaaccggaccccaaccaggccctagaccaggccctagaccacgcacgcctggggcagagggggctgggagccggaccaggagagtcagctccacccaagtggagctggatttacaaaaaagcagctctgagggacctggttccagggaccacaggccacagatgctgagccttaagccgcgggcagggagcctgagcctgatccccccaaaccaggggcctcactccacctctcagctctctgaaccctgtctggggtttcccttgggcaggcaaacctgaaaagccttcgggaaactggcagacagggcggcactgccctgtggatggcatcagggagtagggcacaccgggcaggtccccaggggttagggggagtacagagtaggtccccgggggtctggggagcacacagggcaggtccccgagggttagggggtggtcagggggcaggtcccctggacttagagggtgcgcagggcaggtcccctggggttagggggtgttcagggcaggcccgggggaggagggtgcccaggagaggagggtgcgcgggccgccgcacctggcaggcagggcaggcctcgccgcggtcccagccgcagtcgctgccacagcggcccacgaagggcgggtagccgctgagtaggatatacaagatgacgcccaggctccacaggtcgcagcgcttgtcgtagatgctagcctcctcgctgaaggcctccactacctccggggccatgtactccgccgagccgcactgcgggcgggggaggggcgcgtcagccggggtttcccagcattacgtgggaaccgagcccgggtaactgcgggtcacctgcgccagccggctcggaccccgccccgccgggcccgaccaatcagcggctgccgggaacgcgcccccgcccaatcagcaggtgcagagctcgcccctcccccgccgcggccccgccccacccggccaaacaccgacgcgttggggcgcctgctcgaggccccgccgcgacaccccgcccaaccaatcagcggctgttgctaggcggaagcccgagctccgcggcctggagctgctggatggcccaggctccgcgaggttatgcaaccgcagagcaggcggccgagcccccagccctccccgcgggccctcaccggagtgagcagctccggggtggagataggggagcagtccccgttgagtttgatgccgctgcccaggtcgaagtcacagatcttcacgggggagacctgggaggggccaaaaggtccgtgagcctggggtcccacgcggtccacccctcccgcggggccaccctgccggaactggcctacctggttggggtgctcacagaggatgttttccggctttaggtccctgtgggcgatgcctgggggagaagccacagaaccacgacggggtgagggtctggaggtcttccaggagtccttggcaggcggccctaggagactccgggcggggtcaccacctacctttgttatgcagaaagtccaaggcgctggccacgtcctgcaccaccacgctggcctccagctcgttgaagtgccggcgcttgtggatgtggctcaggatggagcctgggcagggcagggcagggcaggacagggggaacacgcaggtcacctcaaagtcccctcaaggccagcacccacctccactttggcggggacgcccccacactggcttcctccagcacaaaggcctcacccctgagccaccatttgggcaggacactcaccccacaagccccctcctgcaggtggcactaggcccccatcccgtaatacctcccagctccctccctcctcacagcctggagcccccaggtacctccccgcatcttctcaaacaccaggtagaagcggtcctcctcctcgaagaactcaatcagctctaggacgttcctggggtgggggtgggggcaggagaggagctgaggcttcctgaggcccctgggtacctgctgcccggcctaggaggggcccaccctcttggtgctggcctgtccaccggaagctgggactggggcaataggccagcttcacactgcccgcctggggctgtcagccagcctgcttcagggaggggaatgcagggcctgggaaactgggtgccctacagacgcttgctgggggtgatgtggcactcaggcccttcatccactgaaagacagctcaggccagtgcggtggcaagggtggctcacctacctgtgtccctggcactggtacagcatctccacctccctgaaaaccctgctccgaatgtggcctggctgcttctcaatgatctgaaacaggcgaaaggacacagcacctgggttggtgggacgctcatagtcgagaaggggccagaaactccactgccacggctggaattcaccacacttaacgccctgcaactctagaaagcagggctcacgcctgtcatcccagcactttgggaggccaaggcgggtggatcatgaggtcaggagattgagaccatcctggccaacatggcaaaaccctgtctctactgaaaatataaaaattagctgggtgtggtggtacacgcctgtaatcccaactacttgtgaggctgaggcaggagaatcacttgaacccgggaggtggaggttgcagggagctgagatcgcgccattgcactccagcatcctggtgacagagtgagacttcgcctcaaaaaaaaaaaaaaaaaaaaaaaaaaaaagccagtggaggctgctctccacctgtgaccctgacagccctcagagacacatttgagacctatgacttctgcaaaatacccccacaggacgtgagggttccctgccctgggcggccaccctccctgacccagagacagtcagctgtagtcctctttccccacagggtgggtacctggtcacccatagaactagggaggcctcaggacacctggctgccagcccaccaggccccacctcacatgtggccacagcaccaagtcctgctccccagctccgtgccagcctgggcagacacttgcctgccgcctcagccaatatctgtttcgggcccaccctggttggctgtcccagccactggcggatccagcctccctgagccccagagcctcaggaagccactctactgcccccagcagctccagctgctccctgccaccttcactcacagaggtggggtgaggaggcgtctgcagcttcccctggcacctgctgggaccctcctgccaggctggacatgttagcccctctcactgggcgggtgcctggctgcatgagcactctgcccagggttccctgcccagtgcgatggcctggtggcagcagggatgtggcattccacccttgagtccctggctcctgcctctgcagtcccatgtctatactgacagacaacactgtcccagcgaggggcaagagaacaactggacgccagggtgtcctgaaataccaccacccaggccgctgctgaaagctgtgcccagcaggcactgcagatggttctggacaaaactgaacctcgtcctgtcccttgggtggctggctagaatgctgcttcagggagggggcgcagcccctcctggcatggaaggggcctattctgaggtcccagcatgggggctctgcatccagccagcagcctcacggcaccaggtgaccccagggtggcttcccgcagcatgaccccgagggcagagggcccacaccccagtccccatagaacgaaacaacgctcctcagacccacaggcccagcgattcgcctctctgactcgcccaggacacctcctcctcccactgccacctggccagaccaactcccggacgtcagtggccaacaacacctccagcaggaagtcccccaggctctgcagatcccaacactgaccacaccaggtcaatgtggcaagatgaccagggaggtggctctgagacaccagttaggatcccccagaggccacacagcatgagtcaggctacctaaccccctgagcctcagtgtccctatctgtcaaacaaagacaggaagcaaggctgggccaccaggagagggctgtgctcagaggaacgcctgctgtgtggaagtgcttccggaggggcctagtgctcctgcaccattgccttggcctgcctgggggctcccaggaggcagggaccgtccgtactgtgtctgtccctgcctgctgccactgtggtcccagcacctagccagtaacctccccaggttggccacccctcttcttcctccttctcctcagaggaaagctctagcctggccgtccaccaggacccacaggctcctggcgagccctgctcgccagggcacacctggccctctttcccaggcagccagccctcctgggaccccacccagcccgggagccggatgccaggtcacgagggaagcctggaagatttcttggaacacgggatccaaccggcccacaaggtcacagggtcacaaccagagcctcaacagggctcctgctcccagcccttcggccacaccctgggtccagcagccgcccagggctagagtgacacagggggctctcacgggcctgcactgaggttccccaaacgcagagcccctctgggccctgggatatgacattgcattttgatccttgaaaccaaactgtcatgtaccctcagggacagctcagaggcagggacggcccaggggacccaatgggcacagtgcctctgtctgaagcccccaccctggtaccagaggggccaccctcactgtcattcccgactggactcagggcccggtggccacttttagacacgggtcttcccggctgtaggacggacagccggaatgccacacactgtttccacccccgctcaacaccgatcccaaggcgctgggttccccagggcgcggcgcgggcccaccttgacggcgtactcctggctggtgatcaggttgatgcaggtctgcactcgggcatgagcgccctcccccagcacatcttcctgcagctggtagacgtctgccgggcagcggggcgggcgtgagagggaccctggcttttccccgctcccggctcccccaatgcccgccatccccgctcaccttcaaacctgcccgagaagctgtcggtggcccggccgcgcttcttcttcttgcccctcttcttggcgtccgggatgtcaatgggctggctggcgggcatgtctgttccaggaggcacgcccagggggctcaggacatggccctggccggccggcccccacccccctgcaggggctggccactgccatggcagcgacagcagctgccctgtgccctcctccccctcgggcccctcaccagggcgggctgagcactgcaggccaaagtcagagtctccgtggtcgggctggtctagggagaaggccagctcgaaggggttctgcccctgcaggggagaggagaggagaggcactcaggccccatccctgcccacgcagcagggagacctatcctgccccagtgtcgcagcgtccacactgacaagccctgcgctgagcattacggaaaaatcaactccgtccccgctcacacaccaggatcaactcccaccaggatcaactcccgaaggggcagacagcataaaccaggggacccccaagctcctgggattcacctcctcgctgccccacactcagtgtgtgtgtggatttctctcttttttaaatttatgttttgtagagataaagtcttgctacgttgcccaggctggtcttaaacccctggcctcaagcgatcctcctgccttggcctcccaaagtgctgggatcacaggtgtgggccacatgtggaaggcgtgaggcctcctagcacctcagcaaggcaagatcaggggacgcagagtctcttagggggtccatggaatttgccaacccagggggtgattctgtcccccaggagacactgggccatgtctggggacatctgtggttgtgaccggttgggggagctcctggcacggagtggggtggggcaggggtgctgctcagcaccctgcagtgcccaggacagccccaccccagagaaagatgggccccaacctccacagggccgtggggaagacctcctcccacctgcagagccctgggggcctctgggaaaggggtgcattgcggggaggggacagacacaagcagctggctcttgggaaccctgcctctgatgccaggattgagtcaccgtggggcccaagccgtgtcttgcacctccgtctgcttgtccacagaatggggacggctgacctctggggcgggtcgcggggatcaaaggcagcggggcagtgggaaggaggtgagtcactaggcgggctgccagcctggtggctgtgcctgctttcccacggcctcctgggccatctcagggcagctgagtcctccctgggcctcagtttcccccatctaagatggcacacaaccacctctccttcccctaagctgctcccctccctttcgctcagtgcctggggctggcggggtaagaattcagtgcctggtgctctggggcctgctgaaggtgggggctctgcttccatcacccctgccttctgcccctacccaagcccagacacctgcattcctccgcccatgtcccgcagctgcccggcacacctttcccctgccagctctgtgcacctacgcccccgccacccaccagaggctcatctgcttccagccccccaaccccgcagctaccagttaccgagtcagtatacacagtgctgtactggtcctgggggctcacgggagaggcacccacaggcgcgagtgtgccaggccctgcccagaccacatcctgcactctcccatttcagtgccagacacccctggagggagcccctggtgggccctgatacccggctaaggaagccgccttgggccctgggggccaggattcaaatccaggcctgttgcactgggcaggctggggctgggtcatttcttgacccagccccaggaccatgggagcaagaccctgaccagggtgcaaggaacagtgcagattagagtaggctttgcccagcccccgtggaagatggtggcatacatatgtacgtttccacagagcaaatggcccagcgcagggactgccggccctttacgaggggccgggcctttgaagctggggaaccgaggcccggtcaggttccttgtaccactgagctctcactcagcttcacccgtctgggtgaacccaggcgggaggggcccacagaggtggcgggggtcccagtcccagtgaggatgctggctgctctgggccaagtcactgcccctctctgggccccagacaacctgagtggggctctaacaagagggtcgttcagcagaagtgagactccagtggagcccgtgggagacccaaggccaggagatgggtggaggccagagggcagagtctgggaggggccgtgagccaagctgccctcctgcctccccacccaccctggctcgggcagatagctaccaggaggctgctgggggaggagggaaggaaggggggggctccaactagcccccatgggagtcagcattcccataaggctcctgtccagaggcccctggtggccctggggcagccaccacaaggcaggtgaccagggtctaaggccagactggagttcacctgctgtctgaccttggcctagtgacctcaccctggggtctgtcagcggtgagacgggaggcagctgcccccaactcgtgggagctcacgagagtgaaatgacctaaggggccacagagcccagcgtgagctcctggccctgtctggccaccgttcccctgtgccagccacagcctccaactcagcaaagctacagatggacggccgcagccaccacagcggaggggccaggcaccacgagactccgcggcctcctcgcccgtgtacaggggagccccaggcacacgcgcctgcagtctcagagcctcactttcccatctgcgaacggaaagaaacccaaggcacccacagacgtgcctccctgctgggctgctgcctgctggaggcaaggagagtatttcaggagaggtggccccaatccagggagcagccgtgcatggtgggggctgtggggggagattcctagagcaaccggtcccggccacctggaggaacacctcacagccaggactgcctgccaggccctcctccaccaagacgcccaccttcccagctcccagccaggctgccctggccatgcacagaggccggcccacaatcctgggcagtgtgggcggtcctggtcccactgttctaggtctggctgtgggactcgagtcagcaggccttggcaggaggtggctggaaccatctagaaagttcaagtgtgctttagctgcctggctggccccatgcactgactctgtatcagctcatgcctggccctaggagggagaagaccactgtcaggtcctcctctttcccgcccagcccctgacactctgatggtgccaggcctgctgccctaggggaaaactgggcaggggtggcaggggtggagtgctgccctggggcactggctggacagacctgggaattcttcccagtctctctttgctcctcccaccctggagcaccgcgttgtgtgtacacacaagacagagacacacacacacacaaacacacacacatacactcacactctctcttcctctctccagtcctgccttccctaccgggcaacaggtccctgcccaaggaagcccagtgaagcgattacataaccccggcctgaggggtggggcgggccggctgacatcactgcgtcccctgggccaggtcctgcggggcccctgcccagcacctgccctccccttcccccccaagatttgctcatctgaaaccagcactcaacagcagtcaccacccgggctgcgcagaaacttcccgctccgacaggaaacagcacttgggcctggggtgtctgcgaagtgcagggctgaggggacatcccatcccctcccccacggcacaggccccctgggggtgggtgcacctgaccagcccggcctggggattctgaaagaaagtccccagaagccacatggaggtgggaatgggactgtggcccgctgacccgtccccaccagggcacaaccagctggagcttgcaggggacaccccccataagccacatgcagcgactgggacaggactgcagcctgctgaccccccagaacatacccggcgggggcttgcaggggacacacagcctggtgccctgacccggagggggctcctgctcccagcctcacttgggggtcctggaggaaggacccggcggccatggctggagagaggactgtggcctgctgaacccccatcctcgcacaccgaccccgcttcagcgcacggccggcccgggcagccccgggtgtagggcgggggccaggcacgagccccgggagccgatcttaggggcgggccccgcgccccccacgccggccattccggtggtccagcccggagcgcccccaaaccgaccccgggcctcaccttgaacgaacggtggaaaccctgaagttcggctggtttcttctgcaccatcttctgtccgggccccgccagcgggggaggggaccgagggcccggggggaggcccgagggcgggcggccgggcggggggcggccgaggaggggaccctgcgggcgggagcagacaaagggagggcggtgagcggagcccggcctgccaggagcgcggaccgggcgggggcggcgagggctccgcggggcccgtttcccgctaccgggtcggtgtcctcggggccgccctggggttcgcactcaccggggtcgggcttgggccggggccgcagtgccgccgccgccccacgtcgcgcagcccggaccccgctccgcggaccgcgcggggaacagcgccgccgccgccgccagcgcggacccctctacctgggccaccgccgctgagaggagccgggcgcgtcgccgccgccgccacctttataggcccggacctgctctggccccgcccccgacgcaggctccgcccggcctcaccccctgcgcacgacgtgggcggagccagaagagggcgctctccgggaacccagtgcggctgcgcgctccggcggtggggcgtgtccgaaacggctagcgcacgcctgcgcagtgcggcgcacgggggtctcggtgcggaacctaggcagcgaccctgcggcgcgcccggagctggcctgtttttgccgcctgaggctcgcggggcccgtgggacctgcgaggccctgggccgtgtcctaccgcctggccccacacagggcaactcccttggcctgtcaacccaggcctagtataccccgactcccttggttcatgccctcgctctagaacctgccatggctccctcttgcagttctccagtgctggctccagcagtccccctcgtgcaccaccagcacgcttggagtcccagccactcccttctagtgctgggggaccagccaccgccacctactttcttcttcccctgggccaccctgcctggggagcactgagctccccgagtttgctttgtggttggcaggaaccagagtagagggtggggaccgaggtctgtgaaggacccttcctctgtcctcgaatagcatttcagggagaactgggacctgagacccactgggaaagagcccaaggggtggatggtcgccaggacaggaagtaaaacacagtcccattttggctggggccccaaaccaggcttagatagaatcagcctgtcctgagctgccagtcccccatcccacagcatcctggttcaaagtgctccccaggccccgggcctggggcacacaaggagtgggggttcccctgctgggtggactgtggtctcctcttctgcaggggtttccagaagcttcgcacagcccatcccaccatcccccaaccaggccctgagctcaagaggggctggagccccactgacctgaagctggagggcccctgcctgcaaggccacagctctcaggccacaggggctgggaggcctggcctcagccacccccggggcattggggggaagcctgtggggaattcccagccagaacccagcccagcacctggcattgccctgactcttggcaatggggggacagaaaaccaggtcccccagccccccttattgtgcatgtgggtgcgtgtgtgtgcgtgtgaacacatacacgcacaaacacacgttagctccaggtgccaactaggggtggagctgctagacctgcttgcctgggcctggctcacagagggcgcctagtaaatagtgcttggaggaaaggataagagtgtgtgtgtgtgtgcacgcgcacacgcgcacgtaggggttgtgtggtcgtgtgagcttcctggggccactgtaatgcaggaccacaaactggggggcttaaaacaacagaaatgtgtgctctcacagtcctggagcccagaagtctagaagtgtgggcagagctttgcttcctccaagtgctctaggaggatgcttcctgcctctgccagcttctgggggctctggtggtcctcggtttgtggccgcatcactccagtctctgcctcctcctctgtgtgtgtgtctcctcttcttattttattttcctttttttttttttttttttttgagatggagtctcattctgtcacccaggctggagtacggtggcacaatctcagctcactgcaaccttcgcctcccgggttcaagtgattcttctgcctcagcctcctaagtagctgggaatacaggcgcgcaccaccacacccggatagttttttgtatttttagtagagatggggtttcacc[137 bp omitted]ccaagctggagtgcagggacacattcatagctcacggcagcctcaacttcctgggctcaagcgatcctcctatcccagcctcctgagtagatgggacaacagcaccttgcctgctgatttttaaacattttgtagagatggggtctcactatgttgcccaagctgcactagaattcctgacctcaagggaccctcccaccttggcttttcaaagtgctggaattacagatatgagccactgagcctgctgtctcctctttttattttttatttttttttgagatggagtttcctcttgttccccaggctggagtgcaacggcacgatctcggctcatcacaacctctgcctcccaggttcaagcaattctcctgcctcagcctcccaaatagctgggactacaggtacgcgccaccacgcccagctaacttctttgtgtgtatttttagtagagacagggtttcaccatgttggccaggctagtcttgaactcctgacctcaggtgattcgcccacctgggcctcccaaagtgccgggattacaggcgtgagccaccgcgcccggtctcctcttcttctaaggacgccagtcattggcttagggcccactcagtgtgatctcatcttaacttggttccatctgcaaagaccctattttcaaatagtttctcgttcacaggtaccagggttaggacatggatgggtttttccgggagactcagctcagtccacagagtaagtgggaccatttcgtggtatgcggctgtggcacactgtccttggtgcaggtgtggggctgtgtccatctttcagtgtggaccgacatgggttcaacattcaccctgaccatgaggagcagacctgaaccaaggctcagcccatgcctgggctctgtgtccagccaagctcaggcaccagacaggaaaggctgatctgggagccaggccagaggggcaggtctgttcccggcaccatagccaggccctgccccaggtcctgtcctctcccacagccccagcaggtgggagccatcaagagcctcatgcgggccgggcgcggtgccacacgtctataatcccagcactatgggaggc[269 bp omitted]gaggcaggagactggcatgaacccgggaggcagagctttcagtgaactgagatcgcgccactgcactccagcctgggcaacagagcgagactccgtctcaacaaaaaaaaagaaactcgcgcagcaattgggaaaactgaggaagctcagagacaggcagatgacccctggctctagggatgctccaccgggggttcctccccatcgccctgtggacgttcaaggctcagtcatcctctggggtggggccgccctgggcactgcagggagctgagcagcgtccctggcctccacccactccctgccagcactcagccggtcacctggcttcctctcctcctcctcctattaccccagggtggagcccagaagacacccagatggctctcagagggacacagggagcctggtgccctgtgccctggtcccagctgatctgttccccaacaagcccttcgtttctttctgggggcgtcttttgggatgcagatcctggaaggggcatggccaagggaacttcctaggtgaaagggattctgcaggcaggactgagttagaattttttttttttttttttttttgagaggaagtctcgctctgtcgcctaggctggagtgcagtggtgcgatctcggctcactgcaacctctgcctcctgggttcaagcgattctcctgcctcagcctcctgagtagctgggactacaggcacgtgccaccacgcctggctaatttttgtatttttcgta[144 bp omitted]ttagtcgtgacaaccacagatatccccacgtgttgcccagtgtcccctggggacaggatctcccctggggtgagaccccctggtttaggggatttcacggaccctcccaagaaactctgcatcccgtgatgctctgacctggtgaggtcctgggaggctgcacacattgaagtccacaccctgagcagggagagagaaaggaggtgaatcccagcagtggggttccccctggtttacgctgtctgccccatggggcgtttatccgatgtctggtgtgagcagggagaaaactcaatattttccaaataatcgacaaggggtttgtcagcctcaacagtgtggacgtttgggcgggattgttctgtgtgctaggggctatgccaacagggatggggccttggcaccctctcctctcctttcctccccaacagaggcagaatcctctctagccgaccttctccctagaccagccctggacaggcagacaggcccaggctgggggcgcgggatggccagtggcctccggagaaggggagggtcgcccacctgcctgtgtgggccgtgcctggccctgccctgctgtgggccgtgcctggccctgccctgctttgggccgtgccagcccctgggggcgctaccaggctggccacccctgccagcctcgccccctgcccccacctccacccccagctggagccctgggagggagacccccacctgccttggtgggggaaaaagcctgcctggtgggaggcaggaagcctggtccgtgccccgggtgaccgtctccttgatcctcctgcagtgtggtctgggctggggcagtgagggtgggcactagccggcccggacgtgggtgggtgggacaggcagggcctggggccaggaccgcaggtccatgaccccagtgctggtcagccagcctgggagggagctcagggttgccctgggggagcaccagagtgaagaggagggcctgggagacgctagccccagaaggaggacaaacaggaaatgaggtgtggctgcggacaggaatcagcatcagctggagccgatctctggctcctctcctccccttcctccctccttccctcgtccccttctctccttcctcctcccctcctttcctcccctctcggtccttctctccctcctcccctcctcatccttcctcctctcctcccttccaccccttctctcctctcctcccctcctctcctcccctcccctccctcccctctcctcctcccccctcctcctccccccttcttcctcccctcccttcctgccctcctcccttcttcttcctcccctcccctcctccccttccccctcctctctccttccctcccactgcagttcaacccctgccccacctccagcacccagcacccagcacccggctgcaccactaccaaatccatagctgaaaaatgcccaatgcccccagacacaaggacagagacccccactccgccaacgcactgacatccctcccactctccagtgggctccccctgctgcgttcctggcatggccaccaccctgtaccgcactgtcttgcctggccctggggtggcttggaatggcttccagataacctgggacctggccagggtgggtggtggggggcagcatctccagcaggtggcttcttttttttttatttttattttttgagacagagttttgctcttgtcgcccaggctagagtgcaatgtcaccatttcggctcaccataacctctgcctcccgggctcaagcgattctcctgcctcagcctcccaagtagctgggattacaggcacacaccatcaacctggctaatttttgtatttttactagagacggggtttctccatgttggtcaggctggtcttgaactcccgacctcaggtgatccgcctgcctcagcctcccagagtgctgggattacaggcgtgagccactgcgcctagcctagcaggtggcttctttctctctcctaaccccccgggtcccccaccctggagccctcaccaggcctaacttggggtttggccgtggcttcctcttccgggaggtcacggcagggcccagccaaggccctggggccaaggtgaacccgatcctggctgggaggtgctgcggctcctttaaggaggggtcaggacctgccctggaccctgtgggcccccccaacccaagctaggcctggtggcttctcccagggcaccccagcccctcctcacctagtcaccagctagcctcattatctgggacaggtgagagttgaccccagcccagaacctgctttgggtgcacttggagcaggccaggcccagggaggtgctgatggaatggagccagaactggccacacaggtgggtgactgacctgagggtgtggtgggtcgggggatgtgctccaggactcacctgtggctgagctgtctctgcccaatttctggctttgaccccgacgtacagcccccatggacacccagtgagcacccagtgacccgcactggagatcccagctgtctgggccatgctggccccatgcccctctcctataggagacccccagtaaacctagcttcttctctggctgacccgccactggtcccacctccctcaacctcccagggccctggcagagtggcctggagcacacagaaggttcagggatgagctcgagttccctgcaggccggccctggggtgacccagacccctgcgccacctcccgccctcacggctacttcctagggtcccacagccactgggtggcacggccttccctccaggacagggacagactcctgcttacttcctgggacaacagacgccttgtgacagtggaggccgcaccacccaccccaccatgagactccagcggtggaggcccaaaggctcagcctgccccgggtcctgcagctccctggaggcgacctgtcctgcccctggtctcggagcaggcttggccggcctctgcccaaaggtgcacagcccccgcttccttgggggcaacctgtctgcctcctgccagcctttgagcgcttcctcaatctgtagagtgattctttttgctttttttctttagttctgcagaatgcagggcgattttcagcctgtgtggcatgtagggtgtccccaaagccccagaagaggtgcccaggcaggtcctgacttgccagccctgggcttctccctccacccatctccctcaagccagggaggctggccacacagcccaccctgaccacccccgaccacccagcacagggcccggctggatgtgtgcaacaagggatcctatggggggctccattgtctggaggctttttgtttgtttgtttgtttgttttgagacggagtctcgctctgttgccaggctggagtgcagtggctcgatctcggctcacggtaacctccacctcccaggttcaggagatcctcatgcttcagcctcctgacgacctgggactacaggcgcgcaccaccacgacaagctaatttttgtatttttagtagagacgggcttttgccctgttggccaggctggtctggaactcctgagctcaggtgacccacccacctccacctcccaaagcgtgagccaccgcgcccagcaacgctcagctaattttattttcggtagagatgggggggtctcaacatgttgcctaggctggtcttgaactcctggcctcaaatgattctcccgcctcagcctcccaaaatgctgggatcaccacgccaggcccagttattcactgtttatttgccattcaaagttagcttggtgtccgtattatatcagacaaccctacgggggcggggggcggtgacaataaagacctttcccctacaacataaaaaaaaaaaaacttggtgtgggtacgagtgtgagcagatcggggcgtgtgtctgtgtgcccgcggaggcaggcgtccctgggggaggccccaagcctaggtccttgcagggtcagccatgggcccatgtgggagtgaaaggtgggggtgggctgtgcacgcctgtacacacttgcaagtgtagtgggtggcacgagagaccacctcacagttcccacctgcttggctctccagggaccagaaccacggcccaagggccatcccttgctatgaagggccgtgggcagggtcatttcaggacccctgcggggctgagagctctggccatggggccacgaggcaggaatatctgatgtaagtggccgcaagcgtcccttcttgccggctgactcacactcactccactccagtggctcggcaggcctgcctggggacacagccagggcccgcggtcctccagtgggggcagggagtgggcagggcaggtgtggcctggagcctggggctgcctacctgcccgggctgtgggtgtctggccaggagcccggggcagccatggggccatccacgctgctctgacggagtggcatcaggagcagcgtgcatgccccacctccctggggttcagcccctgcacagtccccaaggaagtgtggggcagggctggcccaggagatggccaaaggccaccgccctgccccagtgaccgtgaacaaagcactccgctgatctcctggcgtcctctcctcctcctattaccagggggtggagcccagaagacacccagatgactctcagagaaccactgggagcctggtgccctgtgccctggtcccagctgatctgtctcccaacaaggccttagtttttttgttgtttttttgtgtttttttgagatggagtctcgctctttcgcccagtctggagtgcagtggcaggatctctgctcactgcaacctccgcctcccaggttcaagcaattgtcccgcctcaacttcccaagtagctgggattacaggtgcatgtcaccacccccggctaatttttgtatttactatttagtagagacggggtttcaccat[139 bp omitted]aagggcatggccagggaaacttccaaggcgcaaggcactctgcaggtgggactgggttaggattttgagatgggagatcaccctggatgatcggggagcccagtgtcctcacagggtcctcatgagaggaggcagccgggtgagagtcagagaccggaagaggctgctcttggctgtgagtgggaaggggcccaagctgaaggatgtgggcgcctctaaacgctgggaaaggcaggaactggattctcccctggagcccccaggagggaccagccctgcgcacaccttgatgttagcccagtgaggcccccatgtcgggtttctgacctccagaaccgtgagagaatcgatgtgggtcgtttcaagccactgcacgtgtgtgattcattgcacagctccaggaggctcacacaggcggtgttttcctgagtttccactgtgcagatgagaaggctgaagccagggcagccccggtcaagccccccggactgtcacaggtcctgggaggcgccaggggcagggagatgcggctgggggcgggcgaggccctgcagcctgggcatggggccggcccagggacagggccccctccccgcagggctggatttgctgcgtcgccaaatgccggggctgatcggctgctgggcgtgtgaccccgcgcctttgaaatccgcagagccacgggtcgggccctcccgccccgcccgccgaccgcacccgcgctaggccagtccccgggcgccgcctcctcctcctcccggcggccggggctctgggcgccccccacacggtgtcccggggtgacaggagggtcggagagcacggactcgggggtccgggccgcgcgccctgggaaccccctccccggcggcggccgcgcgcctgcgcactggctccagtgccggggcccctttgccccggggacggggagaggttgccggggcaacgcgtttgcgtcagcgaacctggcgcggcgcccgggctcagagggcgagggaggcggggcccgggctctggaccagtaggactccaaatatttagtgtgggggcgtggccagagatcacgctccagccaatggaattgttgttgtcggggccgcgcgatcagggccttgtgcctcttaaagggaccgtgcgcattactccacacttcgctcgccgctgtgttctgggcggaggcctagggctcagggttgggggtcagtgggcctggctgggggcagaggtaagggagggcgcagactcggagttggaggtcagcgggccgggcccagccccacgtcctcctgttttgcccgtttgtgtgactctgggtccggtctcggtctcccgagcttcagtttccgcaggtgcacagagctggagttgcggagttgtgggcgcgatgcattcacggctactcctcccctggcgggcgcccctgcatttatgcagcgcccacgttttgcactagcaccctatgcaacgaccggtctctctgcaggtcacagaggagctggggggggttgggggaccccagaaggtgaccaggcctggatgaccaggactgaaccgcaggccttggccctgcaccaacacctcttcctctgtggccaggaaacattccttccaaggacccctactggagggggtgggagggttggtcccccaggtcctccaggtcccgggcgctgtgcaactgagtgaaagcacagaggcaggtggtcagaatctgacccccagcggccacagccacaacccctcaccccaggcaggcctcactctccactgtagccctgatcaatgaatcacaagtgaggggcaggaaacgagattgaaggacccacggtgtagacagcaggggaggtgaccccaccaacccacccatctggcaccctctacgtcccaagtctggagtgtcccagtggcagccctcagggcatggataggctggaggcccggcacccctgccgaggctagcctagaagaatgggggtggcccctttggccatgggaagtggtacattcacagatcgcgggaatgacatgggcatctttgggggctgtgattcagccgaccacagagtgtctcaggcttcccccaaggatcccatcttcaccatgtaccgccctcctgctgggaccttggggtctcctgtctgcggccagcccaggaccctacgagttcctcattcctgcttctctcaggagagaccttttaaaggtctgcatttctctttgacttttttttccgcaatagttttcttcattatagaaatacacacgcagcctcactctgtggcccaggctggagtggagtggcacgatctcagctcactgcaatctctctccgggttcaggcagtcttgtgcttcagcttccccagtagctgcacggagacacccagctaatttgttttggagacggagactcactctgtcgcctgggctggagcgcagaggtgcaatctcagctcactgcaacctctgcctcctgggttcaagtgattcaactgtctcagcctcctgagtagctaggattacaggtgtgcaccgccacacccagctaatttttgtatttatttgtttttattttttatttttttgagacggagtctcgctctttcgcccaggccggagtgcagtggcgcgatctcggctcactgcaagctccgtctcccgggttcacgccattctcctccctcagcctcccgagtagctgggattacaggcgtgagtcaccgcgcctggcctatttattttttgagacgaagtttcactcttgtcacccaggctgtagtgcaatggtgcgatcttggctcactgcaacctccacctcccgggttcaagcaattctcttgcctcagcctcccgagtaactgggattacaggtgcccgccaccacgtccagctaatttttgaatttttagtagagacagcgtttcaccatgtgaaaggc[134 bp omitted]cagcttcccaaaatgctgagattacaggtgtgagccacagcacccagctttattttattttttttgagacagggtcttgctctgttacccaagcttaagttcagtggcctgatctcggctcactgcaccctcgacttcctgggctaacgcaatcctcccacctcggcctcctgagtagctgggattacaggagagtgcctccatccccatgtaatttttgtattttttagtagtgacggagtttaaccttgttggtcaggctggtcttgaactcctgacctcagctgatctgcccatctcagcctcccaaagtactgggatcacaggcctgagccactgtgccggccgctattgtcgtttctgagtgacatcatcttggcgatggttttgatttgcatttccctgacagcttgtgtgttccgtcttttctcacctggatgttgaccaacacgtgtgtaaatgttcaagacccacatattttaaaaagtaaaaagaaacagatgacattggctgggcacaacatggccaacgtggccaaaccccatctctactaaaaatataaatattagccgggtgtggtggcacgcgcctgtaatcccaactactcaggaggctgaggcaggagaatcacctgaacccaggaggcggtggttgcagtgagccgagatcgcgccactgcactccagcctgggtgatggagcgagactccgtctcaaaaataaaataaaataataaaaatagaatcttaaaaattgcccgtccttctgaggcctcctgcacagtcatagcgccctgtggccccgcggccaagcgggaggagcaggcaggggaggttgcttccaggacgccaggacactggctgcaggtggagagaaacaggaggggcggctgtggtgagccggggctggcatccacctcctggcgacgcgacctaccagggaccttgccaaggggcctcagtcagccttctgttgatgacacgctgaggtcaggaccagggccacagcctgtgtctgacaagaagcagtttccagttatttggtgaatcagtgctgggggcctggcctgaggggtccagggagtcacacctgactccatgtccctctttcccacaaagtaggagagcgccatgggtcacctgcccgaaaaggcaggtccatcctctgcctgcagtcagaactcagggggatccctgaggccggcagcagagccacgaggacgcagtggcctggcggcgggtggggcagcgcgggagctgctttccaggccagacagacggagccgttctcctgccggccttcccgggagcaggatcccatccagtgatgcgtaggcctgtggcggggacaaggagggcgggcagctgcttttgtttcccatctgcttctctggcttggaaagaagggcagacagctccagaaatatcgaggaacgtgggccacgcctccggggcggccaccaggcggtggcaccagaaggtcagcagagacagagcataaacagcagccacacaagacacccacgcgggacacgggccgtgtgcgcacatgggcacctgatgcctggtggccgagaggacagcacggcctgaacacccggcaggaggggacggatggtccatccacactggaacattatcccatgacgaaccggagccaggccacagcgtgaacctggaggacatcatgctcagtcacagatgccaaactcagaaggccacgcagtgtgtgatcccatttctatgaactgtccgggacaggcccatccagagacagggaggggatgtgtgggtgtcggggagtgacggctgatggggacaaggtttgttcttctcgaggtgatagaatgctgtagaattggaggtggtagttgcacacttttctgaatgtactacatgcgactgaattgtacaccttaaatg[143 bp omitted]atggcgaaacccagtctctactaaaaatacagaaattagctgggtggtggcttacgcctgtaatcccagctactcaggagggtgaggcaggagaatcgcttgaacccaggaggcagaagttgcagtgagctgagatggcgccattgcactccagcctgggtgacagagagaggctctgtctcaaaaagtaagtaggccgggcgtggtggttcacgcctgtaatcccagcaccttgggaggccaagggacgcagaacacaaggtcaggagttcaagaccagcctggccaagatagtgaaaccccgtctctactaaaaatgcaaaaattagctaggcgtggtggtgggcgcctgtagtcccagctactcgggaggctgaggtagagaagtgcttgaacccgggaggcagaggttgcagtgagccaagatcgtgccattgaactccagcctgctccgtctcaataaaaaaaataaaaaataaataagtacatacataaaatgtttattaaatcatttaccatgatttttaaatgttaatttgtattttatataatgtatttcagcacatgaagttttctgactaacgtatctt[243 bp omitted]cggcctcccaaaattctgggattacaggcgtgagccaccgtgcccagcctgtcccatatacatttggattcaccttgatcattaagactgcaattgctggccaggtgtggaggctcatgtctgtaatcccagcactttgggagt[136 bp omitted]gaggcagaagaatcgcttgaacacaggacgcagaggttgcagtgagccaagattgtttcactgcactccagcctgggtgaaagagtgagactctgtctcaaa[132 bp omitted]aaccctgtctctactaaaaatacaaaaattagccgggggtggtggcaggtgcctgtaatcccagctactcaggaggctgaggc[168 bp omitted]ctggctgggaacaatggctcacatctacaatcccagcactttgggaggccaaagagggaggatcgcttgaggccaggagtccaagatcagcctgagcaatgtagggagacttcatctctacaaaaaagaaacacaatcagctaggcatggaggcacatgcctgtaggcccagctactcaggaggctgaggcgggaggattgcttgagcccaggaagttgaggctgcagtgagctgtgatttgtgccactgcactccagcctaggcgacagagcaagaccctgtctgaagaaaaaattatatatatacataaaaactttgcctaagcttctgcttctgccagtctatgtctttgttacagcaattttatggggacatagttcacatctcataaaattcccccactaatgtatacagttcagggcggtgcggtggctcatgcctgtaatcccagcatttcgggaggccaaggtgggtggatcacctgaggtcaggagttcaagaccagcatggctaacatggtgaaaccccgtctctactaaaaataaaaaaattagccaggtgtggtggctggtgcctataatcccagctactcaggaacctgaggcaggagaatcgcttgaacccaggaggtggattgttgcagtgaactgagactgcaccactgcagttcagcctgggtgacagagtgagactccgtttaaaaaaaaaaaatgtgtatagttcagaggtatttataaattcatggagttatgcaaacattatctgaaaagaaaatgttttgtgttgatttttactggatatgaggggttcttcacattttaacaggaggatctttctgtatatttttgtttgtttgtttttttgagatggagtttcactctgtcacccaggctggagtgcagtggcagt[175 bp omitted]ccaggccatctttctgtgtatttctataggcgtccgcaaactttttcttttttcacttgatactcacctcaattaagagcagggatatttacatatgatcagtttattttttttcctaacactatttattgaaaatctttcaatgtcagctctctctccccacctcccccgctttctttttttctgagacagggtcttgctctgttgcccaggctggagtgcagtagtgctatctcaacttactgcagcctccgcctccagggcttaagtgatcttcctgcctcagcctcctgagtggctggaatcacaggtgcaccatcatgcctggcttggtcaccaaacttttactgtaaggggcagactgtcaatatttttggctttgtcgggtgcggtggctcacgcctgtaatcccaacactttgggagtccaaggtgggtggatcacgaggtcaggagttagagaccagcttggccaacatggtgaaaccccatctctactaaaaatacaaaaattagctgggggtggtggcgggcgcctgtaataccagctgctcgggaggctgaggcaggagaatcgcttgagcccaggaggcggaggttgtagtgagctgagatcacgccattgcactccagcctgggcaacacagcaagactccctttaaaaaaaaaaatggcactgtggagcagatggtctctgttggttaactctacagccacagacaatatgtaaataatatgtaaatgtatgagcatggctgtgcgccaataaaactttatttacacaacagactgtgtggctggcctggcagggtggctcacggctgtaatcccagcactttgagaggctgaggcaggtagatcacttgaggttaggagttcaagacttgaggtcaggagttcgagaccagcctggccaacatggtgaaaccctgtctctgctaatatataaaacattacccaggcatggtggcttgcacctgtagtcccagctactggggaggctgaggcaggaggctggcttgaacctgggaggtggaggttgcagtgagccactgcactgtagcctgggtgacagagggagactccatctccaaataagtaaaatttaaaaccacattgattttgggaggccgaggtaggcagatcatgaggttaggagttcaatatcagcctggacaacatggtgaaatcccgtctctactaaaaatacaaaaattatccagtcatgctggtgcacacctgtaatcccagctacttgggaggctgaggcgggagaatcgtttgaacccgggagggagaggctgcagtgatctgaggtcgcatcattgcactccagcctgggcaacaagggtgaaactccgtctcagaacaaacaaacaaacaaacaactaggaaacagcagcctctctggaaggcggttcccgatccccgctctttgcctaacaggagcctgtcccttcccagcgccgtggtgccctctaggggcgaggtgcagcagcacagcgctgacgggcacagggctaagggtccaccctgtggggcccgggctgcccctctctgccatgctgctgaggtgcaaaataccaaattcgtgagccaaagctggtcttccgttaggctccggactcacgacgtttcacgctggaagggaccccggagactcactcacccaatgcccacatttttcacatacagaaaacaaaaagcagctgggcacagtggttcatgcctgcaatcccacacttgggaggccgaggcagggggatcgcctgaggccaggagttcgagaccagcctggccaacatggtgaaaccctgtcactaccaaaaatacaaaaattagggccgggtgtggtggctcacgcttgtaatcccagcactttggtaggctgaggcaggagaatcacttgagcctgggaggccaaggttgcagtgagccaagattgcaccactgccctcctgcctgggcaagagtaagactccatcttaaaaaaaaaaaaaaattagctgggcgtggtggcgggcacctgtagtcccaattccttgggaggctgaggttgcagtgagccgagatcaggccactgcactacagcctgggtgacggcgagactgtctcaaaaaaaaaaaaaaaaaaagaaaggaagaaagagaatgaaataaacaagtcaataaaaagttgtagtgtacgctaatttgtccatgtccaaggccacagcgggctagggagtcacgggctggcctggactccaccccttcggtcttttccctctgatctgttccttggcacagggtaaaaacttttgtgcttcattttcttttcttttctttttttttttttttgagacagcgtcttgctctgtcacacaggctggagtgcagtggtgccatctcggctcactgcaacctctgccgccagggttcaggcaattctcctgcctcagcctcccaagtagctgggatttaaaaaaaaaaaaaaaagaaagaaagaaagaaagaaagaaagaaaagctgagtagctgtctaaaaaaaaaaaaaaagaaagaaaaataaaaaagattttctcagccccaaagcctgaggctcacccctaggacagggcaccctgttaacactggcaggaaaacgacaccatttattccgacgtctgcgtctgtagttttattccgtatctggctgggggagggtggtctccgaggtggatggagtgagggtggaggggacagagatggtccctgctcccacctccccgagcccacctgggaagctgcgtggccgggctgctggagacatcccgagccctgggggagacagaggtgtgggtgtttgggcttcatcttccaggtacaaggagatacatttcatcaagcagttcctgatttcatggagttctttgagggctcggctgggaggtccctctccggggggctccaagtgccggacctggtggtttctggaaggatcaaggacaagtcctgggagtttcaggcttcggcagtaacagtgtgttaattgcacttgttcgattttctggcagaagccaggagagacggggacagcgtgcttctcttcggtgaccatcccaggcgcccagaggtgaccagacttctgtgtggtctgggacagtgcagggctcaggcaggaaggaccactgtggtgaaaggccactgacaattctggtgaggagtagggtggcaggggttcagccagggagaggaggtggctgccttttctcagggccctgctctcaccttccaaaggtctagggtacacagaactcatggattttggtctcgcagccccaggggccacacagaaaaaggggttcaactggaagtttgcagcatctgggaaaggccaattctggcagaactggaagattccagaccaggggagaggcgtccagggagagaagagtcctgcttgggttgatcataagcaaagtggacatcgttccgaag[136 bp omitted]cggtgaaaccctgtctctactaaaatacaaaaaaattagccgggtgtgacggtgggtgcctgtagtcccagctgctggggaggctgaggcaggagaatggcgtgaatctgggaggcggagcttgcagtgagccgagatcccaccactgcactccagcctggttaggccgggtgcagtagctcatgcctgtaatcccagcacttttggaggccaaggtaggcggatcacctgaagtcaggagtttgagaccagcctggccaacatggtgaaatcttgtctctactaaaactacaataatttcctgggcgtggtggcgcacacctgtaatcccagctacttgggaggctgaagcaggagaatcacttgaacccaggaggtggaggatgcagtgagccgagattgtgccactggactccagtctgggcgacagtgggagactccgttcaaaaaaaataaaaatctcaagatggttgtaaatgtgactataaaaatcaaaccctttatgatacacaaaggggcccttaggaaatgagtcagaagccggggtgcaggacgtggggtcccaggagtccaggaagccctggatacagtcagctgaatgtttcggaagaacggaagaagcagagtgcattgaggaagagagagggctgggtgcggtggctcacccctgtgattccagcactttgggaggccgaggatggaggatcactggaggccaggagttcagcgagacccctgtctctagtatgaccaaaaaaaaaaaaatctgtagaaaaatggaagagattggggagggaggaaagaggctgcctgggtccaggttgtgcctctgtgtgaagagacaccagcggctgccagtggggagtgcggagtaaaggcctgcgggaggagatgtccgctctcaggggctcggaagcccctcagcctcttgcctccccaacgggagacatgtaggaggccgagcaagctgggtgcccttgagagacaggcccaggcagggctgtggccacagcagccctgggggctccccagcgaggtggaggcagaagttccaggagcctgggagccacccagggcaaggagtgaccctggaagccatccagcctcctggaaagtggaagtggtttaaaaacacagtgggcttttccggttgctagtaacacatagaattacagagttcacgttttagtcccagacgggagactgaggctcgagactgaggaaggcatctgccgtccggggttggagctcctgaggaccaacacctgctcagcggctcggcccctggtctccctgagatgctcaggccggagagaagcgggatgatggttccagagcgtcctcctccaagtctccgaggccccagcggcggttcgggcaccgggagacccgcggggctctcagtggcacatccgggcggtcatttctttctgtaaagagcaagcaagacatcagctcccaccagccactcctaaaaggggtgatgcgaacagcagacacacggagacgcacaggcagagaaacggcagctgggggcttccctgaacacccaaacaacaaaaaccacacaggcaatggcacacctgagaccaggggcagcaggctaccccatgaggccagagagtcagcattttcagatctgtgggccagacggtccctgtcatgatggctcaactctgtcttgtacctcaaaagccacctcagacgatggtaa[137 bp omitted]cacggtgaaatcctgtctctactaaaaatatagaaattagcctggcatggtggcaggcacctgtaatcccagctactcaggaggctgagggaggagaatcgcttgaacctgggagacagaggttaccgtgagccaagatcgcgccactgcactccagcctgggtgacagagcgagactct[169 bp omitted]gagggaggggaatcacttgaacctgtgaggtggaggttgcagtggctgagatcaaacaaacaaacaaacaaaaaaaccccagaaactttatttacaaaaacaggaagccaggccagagggctgcagtttgctgatccctgtcttatacagactgggacactagaaggaaagttctggaatacagaaaaaaagaaaaagaaaaaagaaaagaaaaagaaagaaaaaagaggaagaccccactaccatctttagagccactgagtatgcaactattaattttaaatttagcaaaatgtttaccagtagcaaagcctgaaaggggatgcacaaaaatgaggaagttatgtgaagatgtttttagtctttttttttttttgagacggagtttcactctgtcattcaggctggagagctgtggcgcaatcttggctcactgcaacctccacctcctgggttcaaacgattctcctgcctcagcctcctgagtagctgggatcacaagtgcccaccaccatgcctggctaatttttttttttcccctgagacagagtcttgctctgtcacccaggctggagtgcaatggcgcgatctcagctcactgcaacctctgcctcctgggttcaagtgattcttctgcctcagcctcccgagtagctggaattacaggcgcgtgccaccatgcccagctaattttttgtatttttagtagcgatggggtttcaccatgttg[132 bp omitted]tactggctgtcacccaggctggactacagtggcgtgatctcggcttactgcagcctcaacctcccaggcacaagcaattctcctgtctcagccccctgagtagctaggaccacaggcacgcaccactgtgcctggctcatttttttcattttttgtagagatgaggtctcactatgttgtccaggctgttctcaaacttctgagctcgagtgattctccctctttggcctcccaaagggctgggattactggtgggagccacctcgtccgtccatttttaaccattttttaaagttgtaagagagtggtggctcccacctgtcatctgaatactttgggaggccaaggtgggaggattgcttgcatccatgagttcagaccagcctgggcatcatagtgagaccccatctctacacacaataaaaaatcagccgggcgtgctggctgtggtcccagctactcggaggctggtggggtcccgctctcacatcaggatccccacatccatacagcgcccagcagcctggggaacaatgcagcctctgggcaggttccagtgccaggccctgaatcacgggcacccactccactgctggtccccatcaccgagacacaattgtgggccccaatttcaagaagcaacattggcttcagggatgtggaccccacaccgaggaatctggtccctgggttcgtctcccgataaaacctggtaacgtggaaagcagacaggctagggcagatgcagaggtacccggctggctacagaagtcgggtggaatctaggcaggtgcggtggctcctgtctgtcattccagcactttgggaggccgagacagggagatcacctgagttcaggagtttgagaccagcctggccaacatggcaaaacctggtctctactaaaaatacaaaaattagcggggtgtggtggcacgtgcctgtaatcccagctactcaggagactgaggcaggagaactgcttgaacccggaaggtgggggttgcagtaagccaagatggcgccactgcactccagcctgggtgagggaggcagactccatctccaaaaaaaaaaaaaaaaaaaaaaaggccaggcacagtggctcccgcctgtaatcccagcactttgagaggctgagatgggcaaaccacatggtcaggagatccatcgagacaatcctggctaacacggtgaaaccccctctctcctaaaaacacaaaaaattagctggacgtggtggcgcgtgcctgtaatcccagctacttgggaggctgaggcaggagaatcacttgaactcgggaggcggaggttgcagtgagccgagatcgcaccactgcactccagcctgggtgacagagtgagactccgtctcaaaacaaacaaaaacaaacaaacaaaaaaagtcggggtggagtctgcttgtgccggctcgcatccctttcataagggacactgagcggcgctctgggacacctgagctcaggacggtgaaggcggagtgagctggacgcggggcggcgcggaggaaactgcacctgtcgccggcatttgttccgtgggagaacgcaggatccctcccagctacctcaccacttgtcccatcagcagggtccccggggcccaactccagccggggccgccagctgctgggccgaccgcaagcagtcagggtcctggccccggaagggttcctctgccacgggccaccagccccaccgtaaccgcacgccctcagccccaagcccgcgcaccagtggctccagctccttggtgtcgatgaggccgaactccttgacgaaatagtagaagtgcttgtagcaggtgttcacgtgggcctcggagcccatctgcgcgatgcggtcaaagtggtggatgtagacgtgcacgaacacgcggaacagccgcgacaggatcttccgcaccgtctgcaggaagttcttgggaaacggagtgcctgcagggagaggggtgggacgggtccacggactcagccaagtccatgtccagaaccctttgctcctggatgt[135 bp omitted]gaaaccccatctttactaaaaaatacaaatattagccgggtgtggtggctcatgcctgtaatcccagctactcaggaggctgaggcagaagaatcgcttgaacctgggaggtagaggttgaagtgagccgagatcgtgccactgcactccagcctgggtgacagagtgagacactgtctcaaaaaaaaaaagaaaaagaaaagaaaagaaaggtacgctgtactctggagggacgtgccctaatgatcatcctcaaacccacgtttatggggtgtccctgagagccatgcagtgcattacacatcgagctgggcagggggtcccgccaacggggtgatgatcctggtgggcccaggggctccatggcagtgattctgaaaccactgagaacactgggcccagcactggcaggggtgcttgtctcctctgcgaaggactccaggcctgatgctgatcctgtcattctctgctttggggtgaggagacaggagtcaccaggagtgattcaggatgaaggggggctactaagagcagcccaacttaggagaatactcagaaatggaatcctttttttttttttgagacagggtcttgctctgtcacccaggctggagtacagtggcacgatcatagtttactgcagcctcaacctcctagcctcaagcgatcctcccaccttagcctcccgagtagctgcgaccaaaggcgtgtgccaccatgcctggctaatttttaaaattttttgtagagatgggatcttgctatgttgcccaggctgagctcaaactcctgggctcaagcgatccctgggctcggcctcccaaagcgctggcattacgggtgtgagccactgtgctcggcctccctgacttttctggaaggctctgtatccccgagcccctgccagctctgactcaccaacgttggtggggaagaggtcctcgttgttgatctgcgcctcgatccagtccatcagcaggtccatgtacctgggcgcggagagtgccgtgggcttccggaacttatgctcatcctgccagcggtactcatacttggggccccccgacatgacggggcaggactgctccgtgcagccgtcgctgatggtgccgtagatgaggttgacgcggttaaagaagtccaccacgtgaacagccacccagtcgttcaggtcctcgcccgggggcaactgcacggccagccgcaggtccagcccggcgttcagcgacgcctgcgccttcttgtgcagctcgaagcgctgggtgcctggctcaaacttgcgcttggggcggaatgtcttgtccttgttgaagacttgcttcaggaaggggttggacatcttggtgacgcctgctctcctggacttctgtagaggggtcctgggccagctggctgggggtgctgaccaacccgagaggccacgaaacactcaccaagccccacagctctcccgcggacctgaaatacacaggggaatcatgacctgctggaggcgacagaatttcccggaaactcgtgctgagggcacaagcggcaggattttgttttgttttttgagacagggtcttactctgttgccccggctggagtacagtggtgccatcacagctcactgcaacctctgcctcccaggcccaagcgatcctctcaacttagcctcctgaatagctgggactataggcacacaccaccacacctgggtaagtttctttatttttagtagaaacgaggtctcactatgttgcccaggatggtctccaactcctgggctcacatgatcctctcacctctgcctcccaaagtgctgggcttacaggtgtgagccactagtggcagggttcaaaacatcccctggacttttgactttaaggagtttcacccaaagggggccacctcctcagtggacagaagagaactgcgcgtggcgaggcctgaccgattcacagcagaaggtgcgcagagccgggccccaagagcccgcaggggccgcatcttccccggtgccgatgcctggcccggacctagacttgctgctacccagcactgtggggcttgagtgtggggcaggctgagatgccagtcacaggggactgcatggccggactacggcctccacaaaggaagccacaccgcaatgcccgcagcctgtgcatggcagcctaggtggaagaaggtctcaagggacgtcatcttggattccttgggtggccccacagtcagtgacaaacatcctcaggagtgaggcagatacgggggagacggctgtgcgaggatgcaggcagagatgggggtgctgcttccacaagcgaagggtcgcccaggatgctggccaccgccaggagcagagagaagcctggcagatgcccctcggcctcagagggacccagccccgcccacaccttcgtctcagacgtgcagccccagaactgagaatgagtccctatcgtgtcagcattctccccatgttgctgtgcccaagtcactggtcactgggtcagggaccccacgattgggtgacccctcttcccttgatttcatccacaaagacccccttccaggtcgggtcacatggcgagatgccgggtgattccaggggcagctgtccaccccaaggcaccgtataaatgaggaagcctccaggagccggcccaagtctcatgcacgcctgagcggtgacttgtgagacacccacgggttgctctggggtggggacccggcgtcctcctactcccctgagaattctcaggggacagagacagagtccatcccgcacagggcggaggggcgacctggatcacacaccgcgcgtgtgccgggctcacgctcaccacgcagggcctgtcaccgccaacaccgttattgtcactgccaggacgccggcaccgtggcaggcccagagtggatgcagaccccaccctgctctgctgggtgcaccttctggacgggcagagacttgactgtgacacttggggcaaggcccacgcagggtgctgggcagggcgggggtcctcaccacagcatgaagaggacccagcagaagggggagtcagagaggggagagggagtgaggcccacacatgcccaggcctcctgggctccacgcaacgctcacaagtaataaacacacattcatcacgttctagtacattccaacccccacctctttttttttttgaggcagagtctcgctctgtcacccaggctggagtgcagtagcgcgatctcagctcactgcagcctccacctcccgggttcacgcgattctcctgcctcagcctcccgagtagctggcactacaggcacgtgcaaccacacccagctaatttttgtatttttagtagagacgggttttaccatgctggccaggctggtctcgaattcctgacctcatctgatccgcccaccttggcctccaaagtgctgggattgcaagcgagcaccaccgcgcccggctgtgttgctgttgcttgtgacgaagtcctgtcttgtgtctcatccctcacgatacatgactgggcgagtgtttggggctgccatcacaaatcaccacaaatttcaggctgaaaacaacaccaatctagcacggggaagctctcagctgttgggaatggatcctgcagggctaaatttaaggtgtggacaggccgggtgcagtggttcacacctgtaagtactttgagagggtgaggtaggtagatggcttgcgtccaggagtttgaggtcagcctgagcaacatggcaagacctcgtctctacaaaaaaatttaaaaattagctgggtgtagtggcgcatgcctgtaatcccagaactgaggtgggaggactgtttgagcccgggagttcgaggctgcagtgagcctcgaaccccagcctgggcaacagagtaagaccctgtctcaaaaaataaaaaataaggtgtgagcagagctggatccttctggaggccccagggcttagggttagggtaccccccaacagtcaacagaacggcccccaccagagaatgatctggacccaaatgttcacagggcctgggggtcggggggaagagatgctgcattgtttgg[131 bp omitted]tctactaaaaatacaaaaattagccagacatggtggcgggcgcctgtaatcccagctactcgggaggctgaggcaggagaatcgcttgaacccgggggacaaaggttgcagtgagccgagatcacaccattgcactccagcctgggcgacagagcgagattctgcttcaaaacaaaacaaaacaggcctggcgcggtggcccacgcctgtaatcccagcactttgagaggctgaggcgggcggatcacgaggtcaggagttcaagaccagcctgaccaacatgatgaaaccctgtctctactaaaaatacaaaaattagccaggcgtgatggtgcatgcctgaaattccggctacttgggaggctgaggcaggagaatcgcttgaacctgggaggcagaggttgcagtgagccaaggtcgggcctctgtactccagcctgggtgagagagcaagactctgtctcaaaaacacaacacaacacaacacggtgcccactgtgaacgcagtgacgacagagtctgcaccataagaaggtccagggtcaatggtttgtcacaagggagcccctggtgaggaccggctgggggacactgctcagggcagcctgggcacaggtggcaggaggacttgagtcccacccacgctgcagtgaccagaaaggcctgaacttccccagcccatcctggggcccttagccaccatcgtcacttcctgccaccagggttaacacccaactaggaacttgaacttttcatctgcctgggacaaaaaccctgtctccactttacagatgagaaaaccagggcccagaaaaccaggcctctaacccctggctctgtggacatcggggttggatcgttctctggggtggggccgtcaggggcactgcaaggtgctgagcggcatccctggccgccgcccctccctgccaggagctcccccaagttatgacaaccacagatgtgcccagacatcacccagtgtccctttgggttaagattagatcgccctgggtgagatcgtggctcagatgattatgactgattctacagcagtgtctcacgccacagagctagtgggtggatcggctggggctcgaaccctggactctgtgggtggatcggccgggtctcgaaccctggactctgtgggtgaagccaccgctctttctgccccacaactccctaaattcagcaactctcagggatgcaggcagccgtctgatcacaagcctagtgacacacgcttcccgggccagcgctgctccaccacggggcccctccactgcctagcagagccacgtggatgctccaagtccagggactgctgacccatcttggttttgctcggcggggcacaaccccagggtcaccacacaggtccccccgcttgcttctcttccatttttagagacaggttctcgctctgctgctcaggctagagtgcagtggcaggatcatggctcacacttcagcctcgacctcctagctcaagggatcctcctgcctcagcctcctgagtagctgggaccacgggcactcactgccataattttttataattttttcaccaccagttaattttttgttgttgttgttgtattttttgtagagacgggagctcactatgttgcctaggctggtcttgaactcctggactcaagcgatccatccgccttagcctctcaaggggctgagatcactggcgtgagccactgtgcctggccacccctgcctgcttcccaaggaaggagtaatcccgcagcccagcctcagaccctccctgggaagcccctgattcaaagaggccacctctgtgcttatggtatcccccggggccggggagcccgggacgcatccacgctgtggctgagcaggtgggagctgttgggggggacctgaggcccttcgccagtgacagctcagcaccccagagccctgcacctgccccagtgatgagctctgcaagccacacctgccctcaggccacaccacctgcagcacaagatcaataaatcccctcaggagaagggaaaatgccggccacctccaggccatggtccgcctggcactgagcgagatgctcctccacgctgggaatcaatcacctcagtccccacatgcctgtctagatggggcgagtgcaggccccactttaccaaagaggaaaccgtgcaggcgagcagatccccatccacccagccaggcccactcacctccctcctccccgtttccgcttcacatctgggccgactcacagccaactttccaactccaacagaaatcacagcacagagcaaaacccaacctgccacagcctggtgctgccgtttgttgatttcagggcctcccatgccaatttgggggcttagcttccaaccgtgccacctggttgggcaggcggggccttccagcagtggtattgcagccctgggctgactgcagccatgggaggagaccccctacctgggctgagcctcagggagaaagcggctgttcccacaggcccccgcttgtctttttaaaactttttgtagagatagggtctcactacattg[135 bp omitted]gactcacaccaagacagttccagaaaacaagacagggcagcccgaggagcttgtaaacttcctcttggcatgtctgtctcctttcagaaggtgaggggtgccaggcgaggtggctcatgcctgtaatccctgcactttgggaggccgaggtgggtggatcacttgaggtcaggagttcgagaccagcctggccaacatggtgaaaccctatctccactaaaaatacaaaaaactagccgggtgtggtggcatgtgcctataatcccagctactcaggaggctgaggcaggagaatcgcttgaacccagggaggcggaggctacagtgagctgagatcacgccactgcactccagccctggtgacagagtgagactccgtcacaaaaagaaaaaggtgcaggattttcagtggaagttaacatcttctgaagaaccttgtggactggcagagttcccgtcacagcagacggttttttttttcctttttattttttttgagacaggatcttactctgtcgcccaggctggagtgcagtggcatgatcttggctcactgcaaactctgcctcccaggttcaagcaattctcctgtctcagcctcctgagtagctgggactacaggcgcccgccaccacacccagctaatttttgtacttttagtagagatggcgtttcaccat[137 bp omitted]cctaggctgctctccaattcctggcctcacgcaatcctcccacctcagcctcccaaagtgctgggattacagacgtgagccaccatgtccggcccgagcaaagcgttttctatcaggaacaaacacaggctccttggcggaggggtgattggccacagaaaggggtcttttccaaagaaaggccggggtggcctcgggaccctgactcccgccctcgttgtcccctgaggccgggggcaggttaccgtgtctggggctccctccgctctgctcttctcggattcctccaggaacagtggagaagacaaggcaggaatcagctctcagaattccacaccaaggccttctgggctcccccggtcttcccacggacgagacacaagtgacccttggaaacttctagagaaatgaaaggtgaaatgacaaattcccctgctgcaacactttttttttttttttttttgaacaacacagtttctctaagcaaccaactggtatgacccctcccccaccgaggtgtagcagctcacggaccacagtcacccacttccttccggaggtttccacatcctgccactgcctcggggaccgctgccccagagcacgggaggcgcctgagagacaagccctgagtggagaagtcagttccatatgttctaggtcagtgcacaacactggctcccggcctggcagcccagccctcatacttggctggaagatgctcccagcccagaatctgtcctgctaaaaaaggcgctgggcgcggtggctcacgcctgtaatcccagcactctgggaggccgaggtgggcggatcacaagatcaggagatcaagaccatcctggctaactcggtgaaactcgtctctactaaaaatacaaaaaaatagccgggcgtagtggtgggcacctgtagtcccagctacttgggaggctgaggcaggagaatggcctgaacccgggaggcagagct[135 bp omitted]ctttcatttatttatttttttgagacggagttttgctcttgttgcccaggctggagtgcagtggtacgatctcagctcactacaacctctgtctcccaggttcaagcgattctcctgcctcagcctcccaagtaacagggactacaggtgcccgctacaacgcccgactaattttgtatttttagtagaggtggggtttcg[136 bp omitted]tttttgaggtgaagtgttgctctgtcacccaggctggagtgcagtggcgtgatctcggctcactgcaacctctgcctcctgggttcaagcgattctcctggtcagcctcctgtatagctgggattacagacacacgccaccatgcctgcctaatttttgtatttttaggagaaactgttcca[140 bp omitted]ctggtaggccaccctcactcctgctggaggatggctgcgtcttccctgatcacccaggcgtgcatcctgtcactgttttgtgcttttgtctggtttacatttttgttttttttagagacagggtcttgctctgttgcccaggctggagtgcagtagtgcaatcacagctcactgcagccttgacctcccgggctcaagtgatcctcccacctcagcctcttgagtagctgggactacaggcacacaacaccacacctgtataatttttgtatttttgtagagatggggtcttgctatgttgtccaggctggtcttgagcttctggagtcaagcgatcttcccacctcagccacccaaagtgcagggattacaggtgtgagccactgtgcctactgcatctctgacttctctcgtgggaaagcagacaggcaggaagcaaggcctgcccaggcccctctgggccaggtgctatcgagggcttagcatactgtcctaattctcctgatagtcttttcttctgtttttagattgacatatgactcacatcccacacgttttaaccttttcagttacagttcaggagtacagttacgtgactcctggcacgtttggcgttgcgcaaacaccacctttatctaattccagaacactttcctcacccctaaaagaagccctggccagctgcagtggctcacgcctgtaatcctggcactttgggaggccaaggcaggaggactgcttgaggccaggagctcaagaccagcctgggcaacatagtgagacccatctctgtacgaaatagttaagaaattagccaggcatggtggatgtgcctgtatagtcccagccacttggaggctgaggtgggaggattgcttgagcccaggagatcaaggctgcagtgagctatgattgtgccactgcactgcagcctgggggacaaagtaagaccctgtctcaaaacaaagctaagatcgtgtcacctaggggacagttacagtgatgagacgtcacggacacctgtggtgcctgcttcagaggactcagcccaaagtttcaagagacaagagaccaagtgtcagaaagaggaagccacagggaggaacgccccaagctaccatcccaacccagggccacactcctttcacggaactttttcctaacccagggccgcaggatctgggcttgactgggcaccaccgacttggcaccgccttcttggcctcctggatggcttcagtctgaacgtgggggcaggagccatgctctgagcccgcccagtgggagccaggggcccaccccagtctcgcctcctcgtggccactgtgaagagctctcagccacactcagctgcagtgggggtctcacctggggggcgattctgcaccccggggactcatactgggtgatgtctgggggcatttgtggttgtcataactggaggatgctcctggcacagagtgggtggtggccagggatgctgcccagtgccctgcagtgcccaggataccccaccccagagactaatcagccttgaatgtccacagtgccgagggggacaaagcttgtcctgcgagtggcaaggccggggatctaactgttcttgtttgctttattttattttttgagacaaagtcttgctctgtcatccaggctggagtgcagtggcacaatcacagcccactccagcctcaacctccggggctcaagcaatcctcccacctcagcctcctgcgtagctgggactcctggcgtgcgtccagataatttttctattttttttcttttttgagatggggtcccgctgtgttgcccaggttggagtgcagtggtgcgatcttggctcactgcaacctccgcctcacgggttcaaggattcttctgcctcagcctcctgagtagctgggactacaggtgcgcaccaccacacccagctaattttttttgtatttttagtagagacagggtttcaccatattggccaggctggtctccaactcctgacctcatgatccgcccgcctcgacctcccaaagtgctgggattacaggcatgagccaccacacccggcaatttttgtattttttgtagagacgggggtcttgctatgttgtccaggctggtcttaaactcctgacctcgagcagtcctcccaccttggcctcccaaagtgctgggattatagacatgagccacggagcctggctctgtctccctctttaatgagtaatttttacaaattgccaacctcaccactagttagtacacagtgactgtagttgtcagaggctcaaacgtgtatctggccatccgtgtttctcctgctttctggggagcacttccctacgcactcataaactaaccctacaggggttcatgccgcagccctgtgaggctggcagggcaggctgaaagcgaatgctctcattcctgctaagtgatggtggacctttgctgtcattagtaaacaggcctggcatttgctggggccctggaggacctgctctcgtgaaactcatcatttcctggctggcgggaggggctcacccgtgctgcacgtccagaagctgaggccagttgcctcgcctgagggtgggaggtaaaaggtacaagtctgggcttgaactcagatccttcaattctgaatctgctgcgtctgccactagggcagcgtttccactctctgcactgtggacatcggcgtgggtcactctctggggaggggccatcctgggcactgcagggtgctgagcagcgtccctggcctccacccactccatgccaggagcacccccagtcatgagaaaaacacaaatgtcccagacttggcccagtgtcccctgggggcagaattaccctcaattgacacctcttgggttaggggattccacggacccccaagagactccgtggcccatgatcctctgctctgctgaggtcccaggaggctacacacattgaaatccacagagggggagaggaagagaatcccaggagctgaggtcccctggtttacaccgtctgccatattgggagtttattctggtgtctggtgtgagcagggagcagacttgatttttttttcccaaataactaatgcagtcccccacttggcattcagggctggatccttctctgggtgagtttgtcctgggcactgcaggtgctgagcaatgtccctggcctccacccactccatgccaggggcagcccctcctctagttgtgacaaacacaaatgcaccccccgcactgccccgtatttccaagtcccctgggggcaaaactgccctggggcaagacctcagctagattggcagcttcccctctgatctaatctaccagggactccactgaggggattctgggggccccgatacccgatccatcttagcccagccaagtccgcatccccagagctccgcagctgccaggcgcttctgaaaccagcatctgcagcccggcagagctggcatggtgactcaggctgccttggttctccagggcacgtagggtgcgactccccacccaggtgtcccagctcagcccatccctttgtccccggtgggaattgtctgtgcttggagtggctcacacccccgaccacttcctttttcttctcatttgcctcgtggcccagaggatgttggcgggctgagtcagggatagaccaccctgccccctgcccccacaggcctgaacacggtgaagattctgcccctcaacaccggacgatgtctggggacatctgtggttgtcaggttttgggggaactcctggcatggagtgggtggaggccaggaacgctactcagcaccctgcagtgcccaggacactccaccccagagaatgactcaatacccagggggagaccctggccccagccccacacaggaagtaacaacttcctccttccctgtgggacttatggtcaatgaaatacgacattaaacatagcaatgatacaaatacgttatttttttttttaagacggagtctcgctctgttgcccaggctggagtgcagtggcgcgatctcgtctcactgcaacctccgcctactgggttcacgccattctcctgcctcagcctcccgagtagctgggattacagctgcctgcaaccgtg[133 bp omitted]cccggccaaaatacgtgcattattttaacacacttttaaaactaataagctgaatataaagctctgcattaaagccagaagacctaagagaaaacccacaacctgtggggaagaaaagggagggaaacctccgtgaaactgacccctgcagtaagtaaccctacaaccaagattccagtgccggctgctggccagatcaggggaacacgcgcttcctgcagagtcattcccaagcccatctggctggaaagaaaagccttaaacttgagccaaaacctctcaacccagaggagacttctcatccttgtgtaacccaggacggcccggccacacagttttaagaagaatgagacacaggctctgacacggaaggacacccaatatccgataagtgcaaaaaataagttgcaaaacagtatggatacccagacctttttttcttttttggagaccgagtcttgctctgtcacccaggctggagtgcagtggcgcaatctcggctcactgcaagctctgcctcccgggctcaagcaattctcctgcctcagcctcccaagtagctgggattacaggcgcccgccactacgcccagctaatttttgtatttttggtagagacggggttcca[138 bp omitted]ggggtgcggtggctcatgcctgtaatcccagcactttgggaggccaaggcaggtggatcacaaggtcaggagtttgagactggcctggccgagatggtgaaaccctgtctctactaaaaatacaaaaattagccaggcgtggtggcgggcgcctgtaatcccagctattcaggaggctgagacaggagaatcgcttgaacctgggaggcggaggttgcagtgagccgagattgtgccactgcactccagcctgggcgacgagcaaaactctgtctgtaacagaaaaaaaaaagagaaagaaagaataataaattgctacaaccatgaaaaaaaataaggaactattgtgtctggaaggaaaggttttttttttttttttttttagctgcctgtttgtttgagatgaggtttcgctctatcccccaggctggagtgcagtggtgcaatcacggctcactgcagcctcaacctcctgggctcaaatgaccctcccacctcagcctctcaagtagctgggaccacaggtgcacgccaccacgcccagctaacttttgtatttttggtagagatggggtcttactatgttgcccaggctggtctcaaactcctgggttcaagctatccttctgccttggcctcccagagtgctgggatcacaggcatgagccatagcgcccgaccctctgtgaatctttgtggtaaactgacatacttttcccagtctgggtatataaggaaaaaaacagtcattttgatatactcaaaaggaaaagggggtgaggcgcggtggcttacgcctgtaatcccagcactttgggaggctgaggcaggcagactgcctgagctgggcaacatggtgaaatccagtctctactaaaacaccaaaaaattagccgggcgtggtggcgcatgcctgtaatcccagctactcaggaggctgaggcacgagaatctcttgagctcaggaggcggaggctgcagtgggccctggttgcgccactgcactccagcctgggcaagagaaactccatctcaaaaaaaaaaaaaaaaaaaaaaaggaaaagggaagaggccaggcatggtccccagaaggtattgtgtcaaagtctgaaagaaaacccaagttcagctttcttttgtgtgcagccaggcacacgctggaccacagccacccactgtgtgttccagagacttctctgggactccgaaaggcagaagtgaaggcctcctcccagaatcccgtttctgaagtcggatttaccttttcggcttaagccatttgaccttctaaatgccaggaaaacaggaacagagctcatcggctggggaaggtctaaaactccccaccttaaaaccccaagctcagtcagctgtgtggggaatttttctgaaacctccaccatcaggtccctaaggtgggaggatacctccttggaagggaatttttttttttttcgagacgttgtcttactctgttgcccaggctggagtgcagtggcgtgatcttggctcactgcaagctccgcctcccgggttcaagtgattctcctgcctcagcctcctgagtagctgggactacaggcacgcgccagcatgcccgggtaaattttgtattcctcagccgatgagctctgttcctgtcttcctggcatttagaaggtcaaatggcttaagctgaaaaggcaaatccgacttcagaaacgggattctgggaggaggccttcacttctgcctttcggaatcccagagaagtctctggaacacacagtgggtggctgtggtccagcgtgtgcctggctgtgtatttagtagagatggggttttg[131 bp omitted]tgcaaggcctccacagccacaggtagtaagctcagctccagagttaaaagagaaaaatcaacctgtggaaagagagggagctgggaagggtgcagtggaacgggtgttgcttgaggtgggtgcctgtgtcgtccctggggaaagggaaacacatccagggggtccggaggacagggacgtgacatgctgggatttcactttcttagttctcactctgtaatcggtagatctcagtgagttctaataaacaggtccctgacaactgcggttaagaacccggcttctggaagttctcagggctgcaactctgcaactc[136 bp omitted]gcttcgcctccagggttcatgccattctcttgcctcagcctcccgagtagctgggactacgggcacccgccgccacgcccggc[138 bp omitted]cctcttgcacttctgaaacaaccagcaaaccaaccaaccgaacaaataaacatccagcttcccctacatgaaagcaagaccaggcctggaaaggaagtgaatccaggagaacagaaacggaaggtgggttttgtctcacgggtcaaaacctagatcatcccacacacgcagggaaatgaatgactagttcctcaaggcatcactgtgggctctgacggctccagccttcagcagctcctcagctctgcgtcccagcgcctcttccgtaaaagggaagcccctgtgactgcgtgatgcacaagaaggaaggcggtcttgggaccacggcctagagggcggccagggcactccccgctgcctatgcaggaggcaactcccaaagcagaaagcacagatgggatgtgaaacacgcaaaacacaatgtcaacatttatccaaccatctgctttgaatacgggcagtttattgcatgtcaattaaacccgtataaactgttaa[148 bp omitted]actccgtctctactaaaagtacaaaaattaactgggtgtggtggttggcgcctgtaatcccagctactcaggaggctgaggcaggaggatcacttgcacccgggaggcagagtttgcagtgagcagagatcgcgccactgctctccagcctgggcgtgagtgagactccaaactccgtctcaaaaacaaacaaacaaacaaacaaacaaacaaaaaaacagtgtgtacaaagactggaaatcttacccccaggatgagctgcggcttggagcactgattttctgctctgtgactgcattttccaatttcccctcccctctcagtgactcctaataaaatgcaccctcgcttacactttctagcccctcttcgctgcagggaggaggggcagcttgtccctggcgggcgcctccttccggggtgggggggccctgccagcgactttggggaccccgagcaagaagggcctattcgaaagggcccgaccgccgcgttggcttggggatcctgaagccctgcagaattttaatccacaccgggaggtgcggggtcctgcgggagggcagcgggcagggccaggagttcacccccgcagctcgaccccgcaccctgtatccccctccggggtaatcggtctccccgccgcccgcgttcgcccctcctgggggatcggcctcctcgccgcctaagttcacccctcctgaaggatccggcttccctgccgcctgagttcgcccttccttttttcttttttcttttgttcttttttttttttcccccgctctggttgcccaggctggagtgcagtgatgtgatctcggctcactgcaacctctgcctcctgggttcaagtgattctcctgcctcagcctcctcagcagctgggattacaggtgcgcgccacctcgtccggctaattttgtatttttggtacagacggggtttcacc[142 bp omitted]cccgtctgagggatccagcttccccgccgccagggttcgcccttcctgagaactcggtctcctcgccgcctaagttcacccctcccgggcacccacctggccgcctctgccgcccgccttcgcccctcccggacacccacctgatcgcctctgccgcccgccttcgcccctcccggtacccaactggccgcctcggccgcctcagccgccgcaccgcctcgcagccgccgcggagggacacggccgcgggaacgccccacacgcatgcccgaccgcacccgcggaccggacctactttccttaaagggcccggggctccgcgcagaagcggcgtgcaggggtctcccagactcggtcccgcgggctttaaggggcccgggcggcgaaggcgcacggagccaagttccgggcagcagccctgggatgccctgagccgggccgggcggaggtctccgttgcctagcaaccggggccgcggcctgtgggcggagcctgcaccgtggctgcgacacggggcggggcctcagcgggagccggccgaggagcgggcaccggccattggcacaggcacgggccattggcgcatgcgtagggcgcggccttggggcggggcccacccagtggcggagtcttctgaggggcgggtcgtgggcggggcctggaggcggagccggcgccgtcagtagtcggctgaggacggaggcggggctgggcctgggatggggcggggcctgcgctggtggggcgggcgggggaggagacacggccaagcgcccgagtgggggccgttggttggtgcgcggctgaagggtgtggcgcgagcagcgtcgttggttggccggcggcgggccgggacgggcatggccctgctgctgtgcctggtgtgcctgacggcggcgctggcccacggctgtctgcactgccacagcaacttctccaagaagttctccttctaccgccaccatgtgaacttcaagtcctggtgggtgggcgacatccccgtgtcaggggcgctgctcaccgactggagcgacgacacgatgaaggagctgcacctggccatccccgccaagatcagtgagtgccggagcccagcccagtcccgactaccccgccagcgagaccccggggcaggccggtcacctggcttctcctcctgcccgcagcccgggagaagctggaccaagtggcgacagcagtgtaccagatgatggatcagctgtaccaggggaagatgtacttccccggtaaggggcgcgaaaccgaggcggggcccccccaccccgggacaccccgcccaccgcctgagcctgaccttctcctgcctcgacgactcagggtatttccccaacgagctgcgaaacatcttccgggagcaggtgcacctcatccagaacgccatcatcgaaagtgagcaaataaggcttcagaggagggaggtgttgcccagagcctcggagacccacggggcttggctgaggctggagtgatgtgaacagggcacctggcaccaggcagctggggaggagggcagctctccagggagggacccagcctagcacctgaaggatcaatgccatcaccccgcggggacctcccctaagtagcccccagaggcgctgggagtgttgccaccgccctcccctgaagtttgctccatctcacgctgggggtcaacctggggaccccttccctccgggccatggacacacatacatgaaaaccaggtgagcctgggccccagtgccgagggacaggccctgaggctttggagggttgggaggaggcaggactggggacaaggctgggcctggtaagatggcgctgtcctgccctcccacaggccgcatcgactgtcagcaccgctgtggtaagcaaggctccgtccaggctgaggggcgtgccggtggcagctcggggccctggaggctgaggggagccctggcggctcttgtacgtgtttcaggcatcttccagtacgagaccatctcctgcaacaactgcacagactcgcacgtcgcctgctttggctataactgcgagtagggctcaggcatcacacccacccgtgccagggccctactgtccctggggtcccaggctctccttggagggggctccccgccttccacctggctgtcatcgggtagggcggggccgtgggttcaggggcgcaccacttccaagcctgtgtcccacaggtcctcggcgcagtggaagtcagctgtccagggcctcctgaactacatgtgagtggggtctttgggtggcagcaagctcacctgggcctgggagggaacactggccacggccactcggcctcctgagtccaaacccactgtctttgtagaaataactggcacaagtaagtcccctcctcaaaccaacacaggcagtgtgtgtatgtgagcacctcgtgggtgagtatgtgtggggcacaggctggctccctcagctcccacgtcctagaggggctcccgaggaggtggaacctcaacccagctctgcgcaggaggcggctgcagtccttttctccctcaaaggtctccgaccctcagctggaggcgggcatctttcctaaagggtccccatagggtctggttccaccccatcccaggtctgtggtcagagcctgggagggttccctacgatggttaggggtgccccatggaggggctgactgccccacattgcctttcagacaggacacgagcatgaggtaaggccgccctgacctggacttcagggggagggggtaaagggagagaggaggggggctagggggtcctctagatcagtgggggcactgcaggtggggctctccctatacctgggacacctgctggatgtcacctctgcaaccacacccatgtggtggtttcatgaacagaccacgctcctctgccttctcctggcctgggacacacagagccaccccggccttgtgagtgacccagagaagggaggcctcgggagaaggggtgctcgtaagccaacaccagcgtgccgcggcctgcacaccctgctgacatcccaggcacgagggtgtcgtggatgtggccacacataggaccacacgtcccagctgggaggagaggcctggggcccccagggagggaggcagggggtgggggacatggagagctgaggcagcctcgtctccccgcagcctggtatcgccagccttaaggtgtctggagcccccacacttggccaacctgaccttggaagatgctgctgagtgtctcaagcagcactgacagcagctgggcctgccccagggcaacgtgggggcggagactcagctggacagcccctgcctgtcactctggagctgggctgctgctgcctcaggaccccctctccgaccccggacagagctgagctggccagggccaggagggcgggagggagggaatgggggtgggctgtgcgcagcatcagcgcctgggcaggtccgcagagctgcgggatgtgattaaagtccctgatgtttctctttgcagaagagttcttgttggggcagggggaagcctctaggggctggaggtgggcttctggggaggcctaaaggtcccagacagagcagggcaggtcctggccttgggtccacagccatgagggaccgacttggagccacactcacagggcctcagggagtgtccccggactcctaggtgtggggccgtggcccacctgagcacacatgggtaggctcacacaagcccacagagcacctgggttcttccacccaaagcgaggccacagtgtggttgagaccagggccagcactagtgcgtttaggtgttgcagtcacttacgtcagacccgagccaaggaacgcaggaactatgggctgtctcatctgtggcagtgacaggcgtggcatcatggccagagtcggggccacgacggcctgactctggctgatggggcctgacacacaggagggagggagtcgtgttccatctgtgcaggggcgcagctccaagtcccattctcactcgggcgacctcagcccggcagtctccttgcttcctcgagcgtccctttgctccggcattggggcggctgcaggacaccagcaagaacatcctcgagcacactgttgctgccaccatgggtcccacacactgtcttgtggccgcctcaggctcccgtcacgggaggggtgcacgggcacatttgctgaggtcaggaacggcgtgtgggaaggtcaccgagtgcctcccaggctccctgggacatgggagccacacgcatgttgggggagaatgtggtagtggccactggggacagtgtcaggagtgatggcgctgggtcctggctgtgaaggatgctgctttcgaggccggcaagcgtgtttaggtaacggcaaagaggctcgcggcaggtgctttcaaggcatggttttctagaaaggatgctggtgtgggccggggctggggtcccgtctgtgctgctctgagccccctgacatccaacgcccgccaccacggccgcgtcttgggttagagtggacaggggcttcccttcactgacccagcgtcaccttgctcgaggctcccgtcttcaaggtgtaaggctggtgtaaaggaggcaaattcacccaggggtggggtggctgctcttccgcggttctcaattctggatctgcccctgccccgggggctcctggggaaggggagggaaagcaggcacctgctcccctgcacggccttgggtggagatgctggggaccgaggccaccacggggtgggggactccctggcctgtgactgcccgagccccaggcctggatggtgctggggaccgaggccccctcccaagggcccgtgagctgaggtgcagaggctccagtcctgcagcgctgcatgacccaggccaggcagaagacccatgtggaaatgcctgttttacaactttattggatcatcttgacacaaaatcatgacagcagcgtgatatgtctctctctttatacgggaatgtcgatagcaaataaattcttatgtaacacatcatacaatttcaaatcctggaatcactgcatgggattctgtaatggattacatgctaaagtgacagttttcatcaaaaggagaagataaaatgtcattatctctgaagaagggtcagtcctgtgcccacgctggccgtggggagtgagcggagtctccttgccctgcctggtgggggctctgcctgtgaggtggctctcacaggtcctgcccaagggcactgggcacactccttcaacacagaacagcccaggtccgctgcttccaggccctgcctgggccttcctaagggtgctgggaaggatgtggggaaaccttggtgcgcatagtggcaagcaggggatgcggaccaccccaaacccaagccgagatgcacttctgctgaccaggaagacgggtggcagagaggcctcaacccaccccgtccacggttctgactgcaacctctctttggcgtccctggccccgccctgcccacagcctggctggcgcgtggcctgggatcccaagacccagtcaccagcccacgagcacactgacaatggacaacgcctggcaagaccgctttcccactgtgggttctgggagagaaaaccttggcgacagcggcccttccttcccctcccccggacgcaaccgtcaggacctttgggtcaaaagcaggcgaccccagaggaggccacgtcagccccgccctgtccaccaagtgcccctcacgtggtgcccatcaggccctggcccaggacaggagcccctgaagccacattcaaggactcggcccccagcgcggggcagggcacagacccaggtgggggagtcccttgctggtttgggggcgagaaggggacttcttgccaaagagaatgggaagagtcacagtaaaaaaggatggtcagataattcaacgcaacaaatgacctcggatgtctacacggcggacaacatagagttaaattaacactcaggcttgggtacagtacacacgactgaggagaggcgagacacgtcagggctgcggtccctgggtacgtgctccgcggggtggtgcggggctcgcaggcagctctcaacacttggccagcgtcgccttcatctcttctaacaagttgctcagtagcgtggagtcactgcacttcccgtcgactgagacagagttctcaccctgtgtaaggaaaaaagatggatattttaaaagtgtgtgcaggggctaggcacggtggctcaagtctgtgatcccagcattttgggaggccaaggtgggtggatcacctgaggtcaggagttcaaaaccagcc[135 bp omitted]gctaacagggtgaaaccccgtctctactaaaaatataaaaaattagccaggcagggtggcgggtgcctgtagtcccagctacatgggaggc[133 bp omitted]aaataaataaataaataaataaaataaaaataaaaaatgtgccgggcatcgtggcaggacacctgtaatcccagctacttgggaggctgaagcaggagactctcttgaacccagggggtggaggttgcatgtgagttgagatcattccaccacactccagcctgggcaacaagagcaaaactccatctcaaaaataaataaataaaagtacatgcaggccaggccggatggctcatgcctgtggtcccagctatgcgggaggctgaggcgggagggtcgcttgagcccaggagggtgaagttgcagtgagccgtgtttgcaccactgcacaccagcctgggcgataagagtgagttcctacctcaaaaaaattaaaaaacaaacaaaaaaacactatgtgcaaatattgcctcgcagctgtatgtgttgtccttttaattttgcgaatttgctaattattaaaaaaaaaaatgggaagggctcgggtgagggagcggcccaaggcacctgggtctcccgtgggaggggctccagcctacatagaagtgggagccggcacctgagggccctgaggcagccagaggcagccggggatgaagaccagaatccgaagagctcctgagctagcagacagttgagcactgtctgtccttccgccctcctgccactgggcccctgaagtgactgtggaagaagccagtggagtggggtaaccagagcccccagagagggaggtacgcggggaaagccaccccgtgaagctgctcacgatctgctaggctcactccatgctgcggatcccgttccaaagagcaaccgaaggcactgagtccagaggccgctgccgggtcccaaggccagggacaagaggcagcactgacaggagaggctgggcaggtggtggtgtgcttggggccacagtccccagaaggcaggggggacttgcagctgggacctgaccacccacgtcctccacaggatggaacaaggcccagaggctcacagcactccacggaaaacgaccaggagaatccactcatacagagaggccctcggcagaccccagtgccaagaccccagtgccaaggcaccaacaccaagacaccagtgctaaggcactaatggcaaggccgtcggtagaccccaatgccaagatcacatcacccagatgccaacaccaaggcaccaatgccaaggccatcagcagaccaaacaccaagacactaacacccagaccctaatgctgaagcaccaatgccaagaccccacgctcaagaccccaacaccaaggccgtgagcagacaccaacaccaagacaccaacacccagaccccaacgccgaggcaccaactccaagacgccaacactcagaccccaacgccaagacaccaacactcagactccaacaccgagacaccaacgctgagaccgcaacaccgagacaccaacactgagactccaacaccgagatgccgaaacccagaccccaacaccgaggcaccaactccaagacgccaacacccagaccccaacgccaagacaccaacacgcagaccccaacacccagaccccaatgccgagaccgcaacactgagacgccaacacccagaccccaacgccaaggcaccaactccaagacgccaacacccagaccccaatgccgaggcaccaactccaagatgccaacacccagaccccaacgccaagacaccaatgcccagaccccaacaccaagacaccaatgcccagaccccaatgccaagacaccaacacccagaccccaacgccaagacaccaatgccaaggccattggcagaaaccaacacgaagaccccaacgtgcagaccccaacaccaaggccatcagcgtaccaaggtggacggacactaggactctctgacacaagtttttttttttttttttttttttggagtctcactctgttgcccaggctagagtacagtggcacaatcagggctcaccgtagccttaaactcctgggctcaagagatcctcccaccccagcctcccaagtagcagggactacaggctcactgtactaatttcttagtactggctaatttttttaattttttgtagacctggggtcttgccatgttcccaggctgatcttgacctccagggctcaagcgatcctcctgcctcagcctcccaagtagctgggaccacagtcacacaccaccatgcccagctggcctaagctttaaagtagctgttaggaaaatgctccaacagatcaccagggcatcagcaaagacatggaagatacaagaagggcccagtgggaatttcagacctgaaaaataagaccctccctgtgtgggctcaatggcagaacagctaggacgaggcagactggtgagcttggcaagagagcaacagccatgaacccatctgaatacggcctctggggcgtgaggggcagcagcccaggctggggaggtgttgggagcaggccccccaaaatctggccataaactgaccccaaaactggccataaacaaaatctctgcagcactgtgacatgttcataatggccctaacgcccacgctggaaggttgtgggttgatgggaatgagggcaaggaacacctggctggcccagggtggaaaaccacttaaaggcattcttaagccacaaacaatagcatgagcgagctgtgtcttcagggcgtgttcctgctgcagttaactagcccaacctattcctttaattcggcccatccattcgtttcccgtaggggatacttttagttaatttaatatctatagaaacaatgctaatgactggcttgctgttaataaatgtgggtaaatctctgttcggggctctcagctctgaagactgtgagatccctgatttcccacttcacacctctgtatttctgtgtgagtgtctttaattcctctagcgccactgggttagggtctccctgaccaagctggtctcggcagggaggaagtgtgcagcacccaaaaagcagcaacagatcagctccagccgcctcaggcccagcagaatggctgccgtcagccgggcgcgggggctcgtgcttctaataccagcactttgggagtctgaggcaggcggatcaggagtttgagaccagcctgaccaacatggtgaaaccctggaaaccccgtctctactaaagagacaaaaagattatccaggcgtggtcgtgggcacctgtaatcccaactactcaggaggctgag[136 bp omitted]gaaacagggcctcctgcacggcagcaggcgggaaacaaagtgcagcactggggaagacagtctggcagctcctcaaaacctcaaacgtggcattaccacaggacccagcaatcacactcccgggtgtatattcagaacaaatgggctcactcctgcaatcccagcactttgggaggccgaggcaggcagatcacccggggtcaggagttccacatcagtctggccaacctggcaaaaccccatctctactaaaaatacaaaaattagtggggcgaggtggcatgtgcctgtaatcccagctactcaggaggctgaggcagaagaactgcttgaacctgggaggcggaggttgtggtgagcccttggctccactgtactctagcctgggtaacagaacaagactctgtttccaaaacaaaaaaataaaaaaaaacaaaagtactgaaggcagggactccaacagttatttgtttaacaacaatgttgatagcagcacaattcacaacagccagaaggtgggagcagcgatggatgagtggacacacagcatggtccatctgtacaacaaaatatgattctgctgtgaaaaggaagggaatcctgacagaggctgcgatgtggatgcaccttaaggacatgaggtgtaataacagcagccagacacagaaggatacattccgtgtggttccactcctaggaggtccctagagccatcagattcacaaagacacaaagtagaatacatggtgccaggggctggggaggcaacggggagtgagtgtttcatgggaggcagtgaatcaggagaaaactgaa[132 bp omitted]aaccctgtctctactaaaaatacaaaaaattagccggatgtggtggcgggcgcttgtattcccagctactgcggaggctgaggcagaatggcatgagcccgggaggcggagcttgcagtgagccgagaccgcgccactgcagtccagcctgggcgacagagtgagactccatctcaaaaaaaaaaaaacaaagcaagggtatcaaaaccacaacagacctctaggaacggaatgctgagtagtgaacatgagccagaagaaggcagagaagcgaaagaaacacgtgcaaactggaaatcctcagtatgctcccagagggcactggaaccaaaccggacatcaagaaaaattggttgtttgaaaagtgcaataaaggccgggcgcggtggctcaagcctgtaatcctagcactttgggaggccgaggcgggcagatcatgaggtcaggagattgagaccatcctggctaacacggtgaaaccctgtctctactaaaaatacaaaaaattagccgggcgtggtggcaggtgcttgtagtcccagctacttgggaggctgaggcag[136 bp omitted]gagaaccaggaaaaaagagacacaaaccgtgaccatcagaacggaaagtgacccggtatcatcacaaggagcagcgcgaatacggcacgcaccgccacgcgtcaactcagtgactgatgattccttgcgctaattctttgaaaagtacaaaactaccaaactcacccaacgtgaacggtaacttggggattcctacaactgttaaaacaaaaaactgaggatgtagctaaaagcctgcagaaaaggaactccccaggcccgatggttttctggtgaattctgtatacacatttctttctaaggaagaaatgccacttatcacacagtctgccccaaaacagagaggacacactctactgcacgtctgatgaagccactggatgacaaaaccaaagaagccaccagaaaagaaaactaaagacccaactcctcatatacagacacaaaagccctcaacaaaatattcacacactgcgtttggcagtcgacacactgcgaagacaaccaccctgcagtactcaggagagggaggcccggagcggagggagcgaggagtcattctagaagcgcagcagtgagaggtggagagtccgaccccagggccttggctgccttgtgcacaggggtggggtggtgggcaggagtgcagtgggagtggggcccctggagccatgtgtcagcctgcggtgagcagcgcagcaggaggcagaagccctgtcttgctgagggagagtctgtgctgctgagtggggctggcacaggtgaggggctcatggcagcagtgctgccatcactgtcctcgagccctctaagtcccaaagcgcgcctctggggatgaaggcctgggcatgaccccaggagaggtggcaggagccagggtgtgcacagcagcccgaggctcacctttttcaccaggaggcagacatggtggccctggatggagcggctgtacatggaggcgcaggagtccactcgctccacaactgcaacagagcgggcagtgttaggcttcccggacattgcatggctgcagccccacccccagagcaggggccaccttcttgggctgcccttggccacagcttcaggaggcctgtaggagcagggtgtggccctgagaggcctggggtgtggggaatgcagcccccgcaccagctcccaggcctcggggccaccagccacccgggatcccaaagggtgtgagtttgggtgggagggccacaggcccggctccaataggaagggacagctgccgcgtgcgtgaaagccccgtgcaatccatcagcccctcactctccttaccggaaaaatggtggtgaaaacagatcttcgccagaagattctggaaggacatccgaatgccatcgactttgattgagctcatgctcaagtccccagactccagcaacttagcaaaggcgtcactgtgggagggacagggaggctgactgcggtggggccgggctcctcaggcttcctggcacagaggccaacaaaacctgccacacacgctgcgcttggacaccctcctgtgtgtctgggccgggaggtcttgggggtcctggaaggtgtggctcattttcatgtgcggaagccgtcacacccagaaactgacaatgacttgtctttaaagaggtcacagaggtgcctgaagccatgggatgggccctcctccgacaaggacggatgtcctgtaggaagggactggggggataggctaggatgcaggcacgcagaggacggcctgtgaggactcaggggggagggggtgccgcacgccaagccgtgccgaggagaggcttcaggaggagcctgccctgctggctccttggtctcacccctccagccttcaggacttccaggggcctggacctctatgggtgacgctgcctggcctgtggcttcaactacacggccccggctggcgcagacaccaggcagcctgacctgcaccagtcacgagccagcgcctccaaatccgtctctaaagtcctgcccagaagcctcagtccccggggcacaggtgtctgcaaggtagaggggaggcggagggggttcggggacataggggagtgggcctgggccccacctgtagcagggagtggtgatcaagtaggagctgcagctgaagtgcagcctgaagtccagcttctcgtgggtcgcaccctcgtcattctgcggtggagtgaaggtggtgcagttgagaggggagtcgggcccagctcagggctcagggttccccaggcaggtggcccacttcccctagggacacctggacacccactgcgatggggcaggaggagcccctgcctgcagagtcggctcttcaacgccaagtggagccctgcataccttggcaatgaaggacagggtccccttgagcttctgcgccatgacgatgctctggatggtgaacacatactgggcttcgttggagacgcctggcgggggcgagagggagtggggcctgagacgctgcgggggctcagcatgggtggggcctccaggtctgtcctcagtcccaagtcctctgtggctgattaggaaactgagctcagcccccaagggagcaccaggggacaggagcagaaacaagaggctactggtgtccctaatttggcctggacttggtcccatccctgtttcagagggcagacttggccactggaaccgtggaacccaagaaggccccagaatccagcccccagcacaacccttgggactctagccaggtccatccgaggccattgcgcttctcagagagctgtggcgagaccccgacactcaggaggtactgaggtgcagcctggggacaaaggggacatggggaggaagcaacaagaaccagcggatccgggcagtcaccagctgccactgcgctcccacagtccccaggagaggccgtgagtggggcagggctcacctgggggcagctggaaaggcacggggacgccatcgtggacggaggagccctgcggccgggccatcctggcattgagtgagtccagcacgctgagctccatgcccttgaggatgctgctgctcctgttctccagcacgatggccacagtgacctggctgtcctcctgcagactgccccggatgtcacaggtctgcagggcatggccagtgttagcagggcaggcgggcccgccacagggaacaggcacagccacctgtctcttaatgaccacagaggcagcaggggtcccacaggcacaggaaggcacggagaggggcgccccctagccgcaggccaagcgcctcctatggctgctctttgagtgcatggcggggaccctcctgccagtccaagtctcagggcatgtctccaaccttaccccaagccagaggtgctgcccaagcaacgcccctgccaggaatcacaggccctgggtataccaacatccgggagctgtgggggctgcccgggttccgcgcgatcccatgccaaagagtgtgggctggcccaccctgcccctgggagcggctgccactcaccattttaacataggaattttcagcgaggagggagtagctggactcaggctggaaatagaaaaggcgcatcagccttgggggccccgagctccgtctcagcgaagactccagtatggcccaataccccaggtcgaatgccacgactccaagaatgcttggggcaaggggcttcaaaggagccgatgagggatccccggctcccaggaccacacagcccaccacgggggtgcctaatgtggggctgcgggccagggccagtcccctgcccccgccaggctcggcttcttctcgaatctgctcagttctctcccgcatggaggctgcaggagtggggagcagcgcacagcccgccaggaaccccggcgtggggcgggggcgctgaagtacccctcaccgggagctgctcctcctctggcgcgccattctgcaccggctcccccgctgcctcctcgctgcctggaggctgcttcttggacttcttcttgcctttggtccgctcctccttctccttcctgtgcttcttcttcttaggcttgggagatttctggagcaagaggagggtcgggttcagtgcccaggctgctccagcacgcccccatcacagtgtgaggtcaggatcacagcagggctgctcaggctgagggtcccacgtgcctgggtgggatggcaggaccagccacgcctcaggcctaccgggacaagctcaggccagaccaggcccagcggaggctggggccgtctctggttggcggcaagcgccaaagcagcccggggaacagtccccaccgaccagggagccatgcagggcaaaccagtgaggacaccacacttgacgcagcaaccccacgcccatgtgcacatccgagagggaacacacacatccacgcgcactgcgcagatgttcaaagcggcatactgtgtcaccacaaaggggaagcggcccaagtggctatcaacagatgagtgggtcagcacagtgtggcccatccgcggaggaacggggtcagcagagggtgacctgtccacgcactggaacatgacccggccacgaacaggaaccaggctctgacccaagccatagtgtggatgcaccttgaggacatcacactcagtgagacgccacacacaaaagaccacacggtgtatgaccccatttctatgaaatgtccaggacacactgatccacagagacaggaaggggatgcgtgggtgccagggcagggaagggagtgagaagtaacggctggtgggaatggagcttctttaggggtcatggaaagttctggaactagacagaggtgatgatggttgcacaactctgtgaatatacagaaaaccactgtatacatacttcaaatgaataaactctatgagacttatgaaccatgtgtgaataagaaggttattaaaaaaacacaagaccacaaccacaacaaaaggcccgtgagaacgccaacacaaatgcgagagcagggctgccctgggacctgggtggcggaagctgtgtccggccccacgttggggtgctggggctcatgcagccctccacagcccctgggggagtgacagcctcaccttgtcctggtcttgcccctcggcatcgtcctcctcgccctgcgcctccgtcttggcgtcctcacactcgtccttcggggtagtgacagtgttcacactgagctccccctgcagggagccagggcttggggctcatgctgggcaatgaggggccccactccactgcaccccagacagcctccatgccacacaccctcagcttgccctcacgcctgcctgagaggccacagtgccctccgagtgacagggagcctgtgagcacagaggccctggctgtcctccccttcccctggcccctgcttggcccactgggacccgggagcatgaccccggctccactcagtgctgggtcccacaggtgcacggtgctgaccgcgagagcacagggcctcaggagacccagggctcttccctgagtgccaggtatgacctctgcagacaccgaggctggcactggccagctgccagtctcttaccgtggatggaacgggggcgggggcgggggcgggggcaggcggtggggtggtagacagccagaagtccaggtcctcagcctgaaaccacaagacaggctgtcagcaaacgcagtgcaatggtcctgggaagaggggacggggacagcagggccaaggaggccccagctgccctcgctgcccccagggtcctggactagctgggccttgcagagcctgggaatccaggagctgaaggcgatgtcctcagccagccctgctggctctggctttcgctgccagaagagggccggggacaaagctgtgggtgggtgtgtgccattccagtggtcagaaggcccgtggcggcccatatgtcttatgtctgcctgggccacctgacgtgggtgtggacaggctcccaggccctgcaaacacatgctcctttgaaaaacccatttctttctctatgtgaaaatctgcacacagacactgcagaaacggttctggagctgcacgtgagggtggcatctggaccacgccgagctctgaccatgtccccccaacacaggtgaggacacggctcacccatgggatcgttgggtcctcctcagtctcccctgacacaagtgcacagtcagctcccctcagaagccacatgtcctcactccgccggggcacagggcgaggcggctggcactcgctgcctgactcagactcacagccatttcccctgagctcaccgctgtctcctgggagttcacggcaagggaggggaatggagaaggccgccgccctgggcactagccttaccttcttctccttctccttcttcttctccttgtctctctctttctctttgtgttttttctctttcttcttgggtttcttgctcttcttttctaccatgggaacgtccttctcaggggattttgaggtctcggtgtttctgtgtttctgaataggcagtttctcgctgtcggctaagggcctggaggaggaatgaccgggccacacatcagcaccactggccaccccccaggaccactcagtacatgccgtgtccaagcatgtggcagtgcgggacctgctcctccagcccctggccccagccatggcccaacatagatctactcaacacagcctgctggaggctctcatgggagggtctgtggtggccacaccctgccctgtcaaggcatggagacctcccgagcaccccaggcctggagacttcagagtccacacttaagagtcttggttgggagggccagccaagagcagtgcagtgaggacgtggtctggggaaggcccgcccgcaccccaccccagcctgcccaccctgcagagcccggccccacccggaagggaggacgagaggaagggaagcaaccacatgtggcctccaccctcaccctgaacccatatggactcacttatccaggtcaatatccagagccctgtaggggtcgttggggtctttgtcatcctcgtcgctgggcagagcattctgacaggaagagaggaaccccatcactggaacccgcccttgtggcctggtggaacgccatctatctgggacgcagtgggactgcccatgcgggccacacgcacaggtgggcagtgacgtggctccaccagaggctccgctcagcgtctaggcactaagggcggctgggccccaggacgcagccaacctgcatctgcctctgaagctgctggccctggggcggtgcgtcgggacgcgtgctcgaggacagagaggcctctcctcctatgctctccggggtggggcctcatcccagccaccaacgaagaccatggggagaggccactgtgcatggccccaggacacacacatgcggaaagatagacatcctaggaccgggacctccagcgaggctgacctcaggcatctcctctgtgacgatgtccacctgctgggcaggggcgatgtcctcgtcgctctccgtgggcagcgagctgtggcggcgcttgcccttcttctccttctccttcctctttttcctcctcttgtccttctccagcttctgccggtgccgccgctcctcctccagcttcacatactgatctgacataggcagccctgcgggccggcagcgggcagccactcagcactgcaccccaggggctcacggggagggcggcgggagcaccccacagcccatgtgacaaatgcggcgccgacacaccggagacacttgcctggaaccttcaaggggacggagaggtcaatctgcaccacgggaatgtgctccacgcccggggtgtcctggtaccgctgcaaaggcaacacccaggcgttaccggtgcaccgaggggtgacacacgtgcaagacaagcctcggggatgcagggagcgtgacgcagccccaacatcctaaggagctggggtcctgccagagccctgggccgcgaggagcgccgtgagcgagcgcatcccgaggacccgactctttaagacagtgaggactggaaagcttgtcacacgagtgaccccacaggcctatgagcagagagaagcaaatcctcgttcactttttttacgtgaatattctgttttctcctcaaatgagaaaagtaatgcggcctcaagcccagagtgaggcagcaggttgcccacgaccgtggggtcagggctggacagcagctgggctgccaggcgcagggaacagggccccccggctggaggctcgaatgaatggggcccacagggaggcgcctgcccctcaaaggctccgcacagtcaccgtgtggccccagctccattcccaggatcttcctgagggaacccgaaactcagatggatgccgcggggctcgggtggtgagggtagagggtgctgagggacaggcacccggggacgggcctcaccttctgtggcgatggcgagctcttgatgtagaaggggttgttggcctgctcctgcttccgggcctctcggcgctgtgggacacagcttggcatgagcccgagagaagcgggcaggatacccctctgtggacgtccaccaccagccacccagctggggaaggctggatctctggctattttcactactgagctttcactaacagggaaaccaaggcccgcaattgggaagagcacgtattgggggaaaaggaatcgctaacgctctgggaggcagggacgcccatgcctccactgccagggtcagggccaggacccacagaggccgctgacctgcctcaaagactccctgggacaggagggaggagacgagggctcgccaggggcagccagcagctcacccgagccagctcttcctcgtccgcctccgacggccggtgcttgggacgccgctgctcctcctcgtggaagacggccctgggcctctcgtcctctgactcgctgtccgagagtggctcattgatccaggcgtccaggtccaggctgcaccggacaggagggccacacaaggcagtgtgtgaccgagcacgcgcctgcaggcgtccgccctgagcaggctcaccacgtgcctggccatgtgatatcccaaacagtggggcctgccacccacacagggccagcgaggcaggtgtcactgccccttaagaggacgcagggacccaggaagactgcggcagggtcacagtggggcccccacggcaggctcaggctgcctcagagctttatggcaagggtgggagcaggcccacttcgcagggagcatccccaggcagaagccagatcccagaaccagtgagagacctggtgagtccgtgtgagggatatacccgcctgaggcctccaatcagccccacaccctcctggctgttcaggggtgcaggagcccccgctgtgccaccaggcatcaagggaccatgtcagggccatggttgcaatgcccccacccccgtatccttacccttcggggactggaaccttcttctgggccttgggggccactgggttcagctccccagcaaagagagcgctgacctcctctgccacaggcacgtccttggcctgaagcttctggatgtgcttgaccagctgcaggatgcaggacgcctgtgggggacacaggggtcactgctggcacctgcccggaaggccactcggccaccttcagggacacggggtggctcagcccctggcacagtgacgtgtgggccccctggtacagccacatagccacagagagcccagccttcatgccgtctctgtcgtcatcatcctcgccaggaagcggcagaaacagaccagtccggaaacagaacagagatgggggcacaacagggagctttgcccactgcagaaatgcctcccatcaggtcagtgccccgacaccagaagcaccacctccctcggcccccgcgggctccccgcctctgtgctggctccaactcagacacagccaggctgggcagctccaacagtgaccatgggccaaggatcatggccagccccgagctaatgccaccgcacagaggagcccggggccacgccccatgcagccttgaagctgggtctcctcagccattggacaggctgacgccactcccgacctctctcacagatggccaggtgcgatggttcacacccgtaatccttgcactttgggaggctgtggagtgtggatcacctgacgtcaggagtttgagaccagcctggccaacaaggtgaaactccgtctttactaaaaatacaaaaattagccgggcgtggtggcgggtacctataatcccagctactagggaggctgaggcagaagaatcccttgaacccaggggatggaggttgtcatgagctgagatcgcaccacttgactccagcctgggcaaaggagtgaaactccatctcgaaaaatcaaaacaaaacaaaaaacaagcagaaaaacagacacctgggaagtggtgggcaccgcctggcacaggtgtacagtctgctcaacctagaacccacgtcacctgcagccaccagaaagagccactgccagccccaggctctcacacctgctgtctcgccgcatgtgaaacaacctcttcctgtggccaggagcagcaccctcacatacccagcaccccagagacctgccccagtcctactgacggatcccccgtcctgctgacctccaggtcccactgactaaccccaaaccccagctggcacaagtggcaacaaaagaatctcagtgagtggcttcggaagaggaagcgaggccccgtcgacctggccgccactggacagaaaggcactgagggctccctgaggctcggcccaacacggagtgttggatcttacccgctcctgcacctccaggtctgcgctctgcacaaactggggcagccggtccaccatgagctgggtgacggcctgagcgccctctgcctccccggcctgctccttctgctgcaggatggaggcgtagagcttgaccacgttctgcacatacacggcctggatgtggcctggcagcgtggtgactctgggccgcagcatggcctccaaagtgtggtgtggttcctgcagatgcctgaggacaggaaacactgtgagcccccaggatgccaatcccggggctcctctctagcaggtgaggacctaggaggcctgggctcgtcaccaacaaggtgactctgggcccttcccattccctgagcggtctccaggggctgagacacgaagtagaagaaaccacaggccgtcaacagcccgtaacacaaacaaggcagagatgtggagatgacagagccactgaatggaggaaaggtcagaagaggaaaaaggacaacggggtcaactgtgcagctggccctgggaggataagcaggatgggcagggaacagacggaaccgggagaccctgatctgtgggacagtggggcctcggggtgcgcctcactggcgtctgacacaatgccttgggacttgaatatgtttctagtccacttttttcccaataagaaaatgatagaagtggccgggtgtggtggctcacgcctataatcccagcactctgggaggccgaggcaggcagatcacgaggtcaggagtttgagaccagcctggccaacacggtgaaaccccatctctactaaaaatacagaaagtgagggcgggcacggtggctaacgcctgtaatcccagcactttgggacgccgaggcgggcggatcatgaggtcaacagatcgagaccatcctggctaacacggtgaaaccccatctctactaaaaaatgcaaaaaaaattagcagggcatggtggcgggcgcctgtagtcccagctacttgcgaggctgaggcaggagaatggcgtgaacccaggaggcagagcttgca[137 bp omitted]aatacaaaaaaattagccaggcttgagcttggtggcaggtgcctgtaatcccagctactcgggaagctgaagcaggacaatcacttgaacccgagaggcagaagttgcagtgagccgagatcacgccactgcactccagcctgggcaaagcttgggagatagccagactctgtctcggggcgaggggaaaaaaagaaaatgacagaagtgctcatctccaggatgcaggctggctggggaccctttcgggatcccagaagtcaggcgccttcctgagccggggcaggcccagggtggggagtgctcggtgtggccgtgatgagcagcaggtagcggccagtggtggtgatggggccgggcccgaggcagtgaggcatagcagcaaatctcataaatttccaagagagcctggaaatccagactgctgtgagaaccgtgagtctcagcaacacattcccacctccaggcaggcccggtgacccgagcctgcccagcagtggctgtgatctgtcctcttggccagggagaacctgacattcctggagacggcaggggcagtgtcgataagacccatccctgcggcccacctggaacctggcactgagacccctgtgcctccagaggggcctggcgcaggcaggctggggctgagcaggtgcctccctgggccacctaactgccacacggagctcccacctcacctacagcaaacagggctcagaagggctgccacgcgcccagctggaactgagccttgcagatgcccagggccagccccccgtctgcagcccaccccatggatcctcccacctcccagtcctagtgcccacgggatctacaatctcctgggaacgccacagatgcccgagggcagagggcagacagggcagcacagactcgcctctgtaaagggggaatgggcccgaccattgtcaggggacaggtgctggaaacccacggacctgcaagacggccggggtggcagggcgatgggagacggtaggaaggatctgccaggcacatccctggtccctacccctcagaagcttggagaagctgccagcccagaggcccagcgcccactcactctgagaactccccgcagatccaggcggcagcgtacagcacctcacagatcccgttccgctgggtgctgctggccagcaggtgtgcactgtcaagcagcgcagacatctgggacacggcgaacttgcggatggccttcacgcggatggccacgtccagcatttgggcggcgatgaggtggccgtgccgtgtgccctccagccgggtcagctccaccaggatgctgatgtacctgtggggcagaggcggtgagtgagcggcgccacggaacccccggccacacccctgggagcgggacgcaccactcgaagttggtgatgtactggtagttggactggctgcagatgtcaatgatcttggtgagcagctcgtcacggtaggtggtaccctctgccttgtctacgtgggtcatcagcttcttcacgatctccatcaggttcttcttggacacctgggcaaaagtgtacagacagtggtgagagcggacccagcctggggcctgcttggtgagacacccaacacctgctcctgagacagaatccacgggacacaggcggacccggattcacagatcgatgccagggaggcagcaggcccctgcgatgtgggctgggttagaggcacacgaccccagccagggagcaacaactggcccagcacagtctgttctgcaggctcggccccgccccctccacacaggccctggaagacaggcatggaccaggactggcgcccctctgccctgccccaccacactaactgatggccgagtgtgaggggactccatgcattccacgtggctctgcacctgacacttaatgtcccttagagaactaaggccaggcgggcgggcggcggacagagggcacgcaccatcccatagagcaggtccagggcccgcagccggatggactcgtccttgtcgtccaggcactgcaggatgaggtccttgtgggactgcacggacttggggtgggtcttcaggatcttggacattgccagcagccccaggtacttcactgcagagagaggccagagccgggtcactgggacggacacaggcagcagggtgcaggcagggcccacggctctccgggccgggtctccacctcgggaggctgcctggccttggcaacctgggggtggacagagcaagtatcccagctggagctcaccacgagggatgtcgccctagcagagccccctccctgggagccggggtgcaggctgcccccatgccggctccctcaggaaggcctcccctacctactaccacgttgtagtagctgctgtcagctctcctcttcccacccagccagtgcagggaagaacgcagagaagactttccagcagcagcagcagatacccttggcccaaggcagggtctcacctgtacccagtactcactgttcacccgactagcccaaaccagctcacggacagctaagggtggctgggcatgaggcacagatgccacaacctaagccagggccaccccagccacagggcacacagctgaacccattcacatactgccatccacggtggctttcaggccacggggcagcactgagcagagacagacaccgtgaggtccacggagaaaacgcagtagtccccacctacccgtgggggatgggcccatgaccccagtggaaggctgacacggcgggcggtactgagacccgcgtgtgggtgtttttctgacacgtctgtgcctatggcgaagttcagtgtgtacattaggcacaataagaaatgaacaactaatagtaactaagaacagaacaaccataaaacacggtcacgaaaggtatgtgatcgcggtctctcttgcaatacccgactgtggggtgcttgcctatttttggactgtgttgggggtacctgaaacctcagataaggagggccactccactatctgggctgttgcaggcgagtttgccaactcctgctctcaacaaaaagacctggcttcaaaatgagcatccaaaacaccgcccaggtacaaggtaccaggcaggggccgctaattctgattcctcaacagagcagcacgggggcacccacatgcaggcaggcacctgggcaagggtgctgtgtgctgctctatctcacaacgcaaagcctcacgcacccccgcaaaaacatgcagaggctgaaatatccagaaatttcggaccaaggtgctcagtgagtggcatctgtccaactgccaggatctccccagtgggggcctttgccatgccccctgcatctcccctgggactggggctcagaggagctggtgtttcccagccaccccacgcagataggtcggggtgcaagggcgccacagggcactggcagagggctgcctctgaggcagagtgccatccatcagggagacagctggggttgcagatgccgtgtccacttcctcctcacactaggaggacccctaacttcacagagctggggacacgaaaatgacagcactggggaggggatgactcacagttctgatcggagtcctcgatcaatatccttaatttctgaacacaaagctgaaaagaagaaaaaaacgatgctggttacatcctctaaaccaagggtgagtcccacaggtaccctccagattcaacctcaacctggcctaaggcccggcgtcagccccacccaccaatcaaagcccaggagggaaacaagcatggcccacatggggcactggagacaagggaggccctgcttcccacgggcgctctcccccactcctcagtgccccatgcatccaccccacagacacatgatggggatcccaagcaggctcgggtaggtagtgcacacaggacgcggctgtgccctcccaagccgcaagatggcgtggggggaccagcaccttggtcacagggtgggcaagctcccgcctgtggaaaggtgtggcctctgcagtgtgggaccccatgggccccgcccagtgcgggacgtacctggatgctggcgctgtggttgggcatgccggaggacagcgagatgagcactgcaacagacagcttggtcagcaccacggtcagcaccatggccagcgccgacaccaactcagggccacggggcaccagcaccccctcgccgggaggagggatgggagggaggacagaaatgccactgagtttgggaccacgcagcccaactgtgtttgcaaaaacctagctccatcacaggcctgaggataggaacctgcaggggcccccaccctcactgacaggatggctcggggcctcagctgttcctgcaaacactggttcactcgcaacccctgcttccctctggagtctggaatcccggcaggggccaggccccgaggccacaggaccagaccctgtaggaacccaggcgctgggtctctgggagcctccatggtgacacttcacaaattatcatcacagctcactgctgggggatgaagcacatccggcaggactccactgaaagaaggctctagaagctgggcctggcctccccaacatccccggagccattcccctttgctgactctgctgcgtcctttgggcagggacaggcaggcagcgagaagccgaccctcagagccccagctctaacagctttaaaagaaagacatgaagccaggggaccgccaggcacatgcagggacagagactcattttccaccaagccagtggcatggaatgaaggtgtacaggagaccgtgtgtgcgtgtgcgtgtgcatgtgttttctttttaagacatgggttcttggaagctaagctatgaggacgcaaaagcataacaatgatctaggccaggcgcggtggctcatgcctgtaatcccagcgctttgggaggctgaggcgggcagatgacctgaggtcaggagttcaagaccagcctgaccaacatggagaaactctgtctctactaaaaatacaaaaataagcgggagtggtggagcatgtctgtaaccccagctactctggaggctgaggcaggagaatcgcttgacctgggaggcagaggttgcggtgagccaagattgtgccattgaactccagcctgggcaacaagagagaaactccgcgatcccccccaccgccccaaaaaagaatgatctaatggactccagggacttgtgggaggtggggggtgagggataagagactgcacatggggtgcagtgtacactgcctgggtgttggtgcacataaatctcagaaatcaccgctaaagaactgatccctgtaaccaaataccaccaaatgccgcccaaaaactactgaaataataatttttttaatacaaaaaatacaaatatctggaaatgaataaccctggacagaaagtctacatataaatgtaaatacgaacgaagaaatgtggcaaaataaatgcatattcacgcatgcaagatttcagaaatgtcacacccaatctttgtaggagtgttgtttttttgttttgttttgtttcgttttttgagaagaagtttcgctcttgttgcccaggctggagtgcaacggcacaatcttggctcactgcaacctctgcctccctggttcaagcaattctcctgcttcagcctcccaagtagtcgggattacaggcgcccgacaccaagccctgctaatttttgtattttttaggtagagatggggtttca[143 bp omitted]tttcttaaaataggtgtatagattacccaggtaggaacaaatgtattttaaacagaaatgtaggccgggcgcggtgtgtagatgtgttaattatctgaattgtgctatttgacaatctagaggtgtaccttaaaaatataccatttttaattgtcaactatacctaagtaaagctagaaaaaaaaaaacaaaagagatggggtgctggctgagtacagtaactcaggcctgtaatcccatcactttgagaggtcaaggcaggaggatggcttgagcccaggagttcaagaacagcctgggcaacatagtgagaccttgtctctaccaaaaattcaaaaaattacctgggtggggtggcatgcgcctgtagaagcaagaggactgcttaagcccgggaggtcaaggctgcagtgagctatgatcgcaccactgcacaccagcctcaagagagacggggtctcactctgtctgcagcctggaactcccgggctcaagtgatgctcttgcctcggcctcctgaatagctgggccctcctactggtgagaagcttctgctttatcaaccataaggaagtccaccgcccaatgccccgtgaggctttggctgacttggagcagcttggcagagaccactggggacattggtcgttggcccttgtgccctggcccagccggaggtgtggat[133 bp omitted]aaccccgtgtctactaaaaatacaaaaattagccaggcgtggtggcgggcgcctatagtccctgctactcgggaggctgaggtaggagaatggcgtgaacctgggaggcggaggttgcagtaagccaagttgcgccactgccctccagcctgggcaacagagtgagactctgcctcaaaaaaaaaaaaaaaaaaagaaagaaaaagaaaatatttttgtggtagatgctgctatttaagtatccacgggtgaaacgatatgctgtctcaggagtgctttaaagtctcagaaaaaatgcagtgtactgtgagagcggatggcaggccctgagcagcaggggccggcatctgtggaagcaggtatgaggaggggctttatctgcaggtgaatctttcatacccaaggggactccagagtggctgggccaccaggcagcttaagaagcaaacacccagcaccaatggcggtggaagaccaggcagacgcatggccaccttgacagcagaggcctgggacggactcccagccagccccaggccccaccagccagctttccttctcagttccagcaggggtggcgctcggagacaccaggcctggcgccctcctgtccccacctgagaccccagcctggcagtgccagcccttccagatggggagagtgccagttctcacctgcaatcacggtgttcacacattcatagaggagagacatggcagacgtgctaaggaaaggaacacagggaagcggcatgaggactgggggcctcgtcagatgcagtgacccagtgccggcagctcagctggagacggcctccgccccacggctcagggagtgtgccccaggagggagcccgtgccttgctctccaaggcctgtggtgctcggctggtcatcgtctcatcttcccagaaagggcaggtgagcaatccctctgcaactgcaggcccgtgacagcatccacgcagggacggaccacgcacccccggcggcctgtgagatggcaataccgccttcctactgcatcttttctagagttttttttgttttgttttttgtcttttctgagacggagtctcgctctgttgcccaggccggagtgcaatggcgcggcctcggctcactgcgacctccgcctctcaggttcaagcggttctcctgcctcagcctcccgtgcagctgggattgcaagcgtgcaccaccacgcccggctaatttttgtattttttaggtagagacggggtttcaccatgttgcctagactggtcttgaactcctgacctcaagtgatctactcgccttggcctcccaaagcgctgggatcacaggcgtgagccacagctcccagcccttttcggtgtttcgatgtgttcagacacacagataatcaccatggagtcgcagctgcttacagctttacagtcacctgcagcgtagggccgcagccaggagaatggccacgcgccatagcctaggagtgtggcgagcttcagcagtgaagtccgtgtgcgcgtatgctacactgctcacatggtgaaatgtactaatgacacccttctgtgaatgtgtccttgttgccgacacatgactgcatctgaaagtcatggcgatgacgcctctgcctgcggcccactgcacccctccccttccctgcagtgggggccggggaggggtcctggctccgcctcagcacttggtctgaggaattaaagtgtccccttctagcaaccaaaggcagcctggcctgaaaaggctcctaacataggatcccattccacaaccttgcagtgcggagacccacaaagaaaacccaaactccccaaacgtctctaagcagcatggagaagagtctagtggccgggaatgccactacaggcttccagtctaggacggacagtcatctttcagctgcttcacgcccagcccccgctgtaccgcactggggccgggcttgcagccactccagcactgcaccccgtggagccggcccgcccccgccgctccgacactgcaccccgtggagccggcccgccccacagctccgacactgcaccccgtggagccggcccgccccacagctccgacactgcaccccgtggagccggcccgcccccgccgctccgacactgcaccccgtggagccggcccgcccccgccgctccgacactgcaccccgtggagccggcccgccccacagctccgacactgcaccccgtggagccggcccgcccccgccgctccgacactgcaccccgtggagccggcccgccccacagctccgacactgcaccccgtggagccggcccgcccccgccgctccgacactgcaccccgtggagccggcccgccccacagctccgacactgcaccccgtggagccggcccgcccccgccgctccgacactgcaccccgtggagccggcccgcccccgccgctccaacactgcaccccgtggagccggcccgcccccgccgctccgacactgcaccccgtggagccggcccgcccccgccgctccgacactgcaccccgtggagccggcccgcccccgccgctccgacactgcaccccgtggagccggcccgcccccaccgcgcatggcctgcactcacctgtggatgagattggtgaggggctcgatcagcttcttgcccagccgcggttccaaaggagtaagagcaccgaactgtggggacagcagggcctcggtcacccgcagggaatgccccacgcagggtgagggacagggggggcctcggtcacccgcagggaatgccccacacagggtgagggaatgccccacacagggtgaggaggccacattcccgggcagtacttgccagcttgatgatcttgatgaggacccagttgttggtggaggacgtcatcagcttgaaaaagagcggggccagggacaggtagttcttagggttgcgtctggccagctcgcagatgacattgacggcagccgactgaacccctggggaacaaggggttctcatcagcatgcctgtccttccacctagaaaaccatcctactgtcttcctggcccgcgaggaagttctggggcctgcagcagctcccactgaacatggccctggctctgccacctcctcctggtgacagggacagcagccacagacctgatcctccagggaacaggccacagcagccagctcctggcgctgagaaagcattgctcggcactgttgccaggaacaagtgcgcacaagcgtcaccaagctcaggacagcctgacagcggccctctgagtgggggtttcagcatgagggctccagaaacagctgcccagccatcggggctcagggagtcttcctgctgcatccatgcccaccactccagggagaagctcgcccatcgggtcccgggcttagggctggggtctcccctcctgcacacagggccttgggattcctgtgggctggctttggggtccaccgacccacgcctgccacacgccagaggcttcacacaccagcccagggaaactcagtgaaactgaatctgcagccgcgtcccgcagtcaccacaccacaaatacacaacagctacactaggtggaggcagctcctgcacgggacatatggtctagaccatcccctgccctgtggaaggtgcctcctggtggcactggtcctaagaggggctggcgggggtgggtacacctctgctcagggacacgccagactcaccgccagctgccacattggatcttactgcccccaccaccagcacctccctcctggctgccccagcaaggggaggcccagccacctccaacaggcatgttcctggactgagcccttcaccactccccgcagcaccccccaaaacacgccaccacctcttcccagggcaccggctgagcccccaccctcaaccctgaggcttaactcaaatccacaaaccggggtcggggtcctccagcttctccttcagccggggaaaggcagggcgcagcgactcggggtacttcaggaacaccttgtacatgatcagcacagccttcttcctgatgtagggcttggtgtgtgacatctgcggggcagcgggcttcagcctgcgcgggctttctgcgcctcatccctgctctcgcccctcccagccgcctcctccacagagaggagatgccctccagcccgacgctgtggctgcacaccagtcccaggggccacagaccagcatcttggatggcatggaagccagcctcactgtgcccctgactcaggcctgccctccagagagagccctcttcccttgtggccttcctgccccagggtcctgggtcccacagtgggaggaaggctggagaggaaagtcacacagggaacgagggtgtgctgggaacacagcctacagcccagctcctcacggctgtgccctgcgactgctcaaattccccagcgggagccctcccatctaacaggcccagggagtcgcctcgaactgcctggtcctgacagagccaatccatgatggggcactgacatccaccctctcgtgggctccccactgctttactctagaggagccggcactctgtgaaggccagcagtcagtgttttcagcttcatgggccagacagcctctgtcatgaccacacagctgtgccttcacaaccaaggccaccagagacaacacaacacgtgaaaagaaggtgcagccggctggatttggccctgtgccgcagcctgctgatccctgatctagaagcttagcaggctgtgctgacaatctccaagaccatcagccacgatctagacacctccaggtggacaggcagccacatggggacggcgcccatcggccacgatctagacaccaggtggacaggcagccacgtggggacagtgcccatcggccacgatctagacaccaggtggacaggcagccacgcggggacagcgcccatcggccacgatctagacaccgggtggacaggcagccacgaggggacagggcccatcggccacgatctagacacccggtggacaggcagccacgaggggacagggcccatcggccacgatctaggcacccggtggacaggcagccacgcggggacagcgcccatcggccacgatctagacaccaggtggacaggcagccacgcggggacagcgcccatcggccacgatctagacacctccaggcggacaggcagccacgcggggactgcgcccatcggccacgatctagacacctccgggcggacaggcagccacgcggggaccgcgcccatcggccacgatctagacacctccgggcggacaggcagccacacggggaccgcgcccatcggccacgatctagacacctccgggcggacaggcagccacgcggggacagcgcccatcggccacgatctagacacctccgggcggacaggcagccatgtgaggacagtgcttcccagggaggaaagcatgcccgctccacactgttaatctggctactgtgttttaaatgaaaaggaacaaaggtcccctcatgagctggaggttaagtcaggcacaaaacagatgtttctggggccaaaatttccaggggcttcccaggttttagactgtcacagccgggggcgtagcctttgacaagcagagtggcaaggaggagtcaagctgtggccagggatggaggaaagaggaccacacagaagcccactggcagctcagacaggagccactgtcagacctcagggcaaacatcccccaccgtgcctggcctgtcagggacaccctgttgctcctctcggcaagatgatttcaaatatcaacttaagacacgcaggaaccaaagcggcccaagagccgctccaccagctgacagtgatttggttcccatttcaggcaggccacgcaccggggaccccggccggtttccgcatagccaagcttcccaggcatgccactttgaccgagtttttcccagagcagacatgcaggggtggtgggcaggcttacaaactcaccagtgtcatgatgtcatttgccaggtctctggcaaggtctggggtgacgaagcaggacagacccgtcagtgcaacacctgtgtcgtactggctggggctgctcaagtcctggaaagtgagagaaaggggccgtggccaggatgccctgggtggcacatccgacgcctgggtcaccaggagcagcaggagcgaaattctcccaggatgccccaggactcggcatatcctcttggggtgcagctgtgccttagcacccctgctgctgaggggtctgaagctgaactcggacaaggaggaagaatttacagcccatgggagactctgtcaccaagagaggagccgggatgggcgcggctgggaacagtgaggtctgaggcacaggctgaaacgctctgtgggtgggaatcaaccaagtttcttggctcctcctggatgggcagggctggggacagagaggtctgaggcacaggctgaagcactctgcgtgggaatcaaccgagtttcctggcacctcctgggacagaggcgcctgtcacaagtcactccaagtgtggggaagggccaccccgggtgcaagagcagagcgttccaggcctaaaaccagggcttccctcacgtatcactggcagctcccagcttgcagagacggcggtgctgggcctggcacagaatgggcaggaaagccccacaggatggggtcctcagagaccctgctcccatttggggtccctttccgcaacaactgaggggaagggcccaggaacagctcccatgggtccctctcaaagttcagctggcagctgcccacgccctcccatgaactctgccccagctcttcactcccgcagctctcactaaaacacggaatctgccccagctcctgtgtcagcacttggggaaataaatcctctcttgatatcacaaacctgctcttggggagagatcttcttaaggaaactcccgagacttcatctatatatgcatctaccaagatccgttttcagggttaatattctgtggtcaaaatatgacaaggccagcttttttttttttgagacgagtctcactctgtcccccaggctggaatgcagtggtgcgatctcagctcactgcaacctccacctcccaagttcaagcaattctctgcctcagcctcccaagtagctgggattacaggtgcgtgtcaccacgcctggctaatttttgtatttttagtacagatggggttttacc[264 bp omitted]cacggtggtgcacacttgtagttccagctacttgagaggctgaggcaggagaattgcttgaacccaggaggcagaggttgcagtgagccgacattgtactccagatggcgacagagtgagactctgtctcaaaaaataaataaaataaaataaaataacacagtgagctgaagtggtggcacacacttctaatcctaccactttggaaggccgaagcaggaggatcacttgagcccaggggtttgagaccagcctaggcaacgcagtgaaaccctccctgcctctacaaaaaatacaaaaaaaatcagccaggtgtggtggtgtatgcctgcagtcccagctactcaggaggctaaggtggggagatcgcttgagcctaggaggtcgaggctgcagtgagctgcaattgcgctactgctctccagcctgggtgacagagcaaaaccctgtctcaaaaaaaaaaaagtaagaaaataattttttttagggctgggcgtggtggctcacgcctttaattccagcactttgggaggccgaggcaggcagatcatgaggtcaggagttcaagactagcctgaccaacatggtgaaatcctgtctgtactaaaaataccctaaaaaaaaaaaagaaagaaaataattttttttttttgagacggagtctcgctctgtcacccaggctggagtgcaatggcacaatcttggctcaccacaacctccgcctcctgggttcaaacaattctcctgcctcagcctcctgagtagctgggattataggcacgcaccaccacgcccggctaattttgtatttttagtacagacggggtttcaccatgttggtcaggctagtctcaaactcccaacctcagaagatccacccgcctcagcttcccaaaatgctgggattacaggcatgagccaccgcacccggcccaggaaataattttttttattaaaaaacaagccaggcgcagtaatcccagcacttggtgaggctgaggtgggcagatcacctgaggtcaggagttccagaccagcctggccaacatggtgaaaccctgtctctattaaaaacacaaaaaaattagccgggtgtggtggcacatgcgtgtactcccagctacttgggaggctgacgcaggagaattgcttgaacctgggaggcagaggttgcagtgagccaagatcacgccattgcactccagcctggacgacagagcaagactccatctcaaaaacaaaataaaacaaaacaaaacaaaaaaataaaataaaaaacaaaatgaggccaggcacagtggctcatgcctgtaatcccagcactttgggaagccaaggcgggcagatcacttgaggctgggagttcaagaccagcctggccaacatggtgaaaccccatctctactaaaaatacaaaaattagccaggcatggtggcgggcacctgtaattccagctactcgggaggctgaggcagtagaatcgcttgaacccaggaggcagaggttgcggtgagccgacatcacgccactgctctccagcctgggcaatagagtgagactcagtctcaaaacaaaacaaaacaaaacaaacaaatgacacactggactgcaaacatcggaagcacgtgatcctacacagaggaagcaggtgctaactggctgagccagggcccacctgcgtccgaggccaggccaggggcaggcaccaggtcagagccgcgcccgacacacagggtctaacagccctgagcacctcgcaaggcagcggcggatctaagtccccagtgaggtgctcacacagggaccggccgtgccgagcccatcagcaagagacacaaagctgggcacgacacgtggccctccttgctgggcagctgccacctgggtacctagggcggctggagccctccaccctcctccctcccagttaccacctgcaaaacccgcccccatcctcctcttagcgggccagactcccgcccaggccccacctgctacacggccacgacccaaggagactcccgcccaggcccctcccgctacacggccacgacccaagaagactcccgcccaggcccctcccgctacacggccacgacccaagaagactcccgcccaggtccctcctgctacatggccatgacccaagagccccacggcatctagggcgcatgtcgcccgcggcccaggcgggacgcccagctctataaccttgcccacaacggtgagcccagcagagccaacagtcccaggacctgcaccacaccctgtgccggacatcagtcacagccagtgcccccacacctgtccctcggcgtgctgggagcccccagcccaggacttcaggtcacactgtggggtcgacaacacagccacagggtcccgcccttgcacatggacattggagagccgggaccgtggcctctgacgtgcggtctggggccagaaaggggccagctgcccatgaaaagggtgggcctgattctccaacaccccaacccctctattgagaggcgggaaccaaaggtgttcagagctcggggccaataaggacctttactactacccagtggcctccgtgaccatttcaaaatgcaacatttacatggtgctgaaaaatgcacctcgtgggactcaaaaaaagccgcgggcaggaagcaccccacatgggcagggaagggcccacagctacaccaggcactaccatgaggggagaagggaagaaagtgggtgaccgcagaggccagctgcgagtggaccctggagccccattcgccggcccctccaggtggtgagcgagggaagggggcaccgcaccactcagcatccctccacctcacaagcccaccagggagcgcaggctcagacccgccgggcctcctctctgcgtctgctgggaggactgtggctccggaagccccgctcgcactcaagggggccacaggcacctgctgcccacaggaagacgcgtgtgggaaccagacgctccggcaagggcagactgcactcagcacagagcggccccggcccgggaacacccaccttacggatctgattggtggtcagcatgatgacgtcggtgccttcgtgaaagctctgggaagcagcgaggtagccaattcgctgggagagaacagatgagcacatcagaggcaggacacccgcagcctccaggagctccagctctgctctgcagcgaccacaccaggcagcgccagcccagaagcaacaccctgcagcctggacgctggggccaccagcaagtgggaaccaacccgcatttgaaaaccaacgcagatttcttcaaaattccatgaggaaattcccagtttggaatatgtatgtgtttttttttttttcttggagacaaagtctcgctctgttgcccaggctggagtgcaatggcacgatctcagctcactgcaacttccacctcccgggttcaagcaattctcctgtctgagcctcccaagtagctaggattatagccgcgtgcgccaccacgccccactaaattttgtatttttagtagagatggggtttcaccatgttggccagcctggtctccaactcccaacctcaggtgatccgcctgtctcagcctcccaaagtgctgggattacaggccactgaatccaccttgggtaacagagctagactctgtctcaagaataataataataaaaattggccagtcacggtgcctcacacctgtaatcactccccaccccaccagccttgccgtcccagaacctcaccttgaaggtgaacttggaggcactcatcacttctatgatgttgaaggcggcccagctgatgtcgtatcccaacatctgtaactgttaagggacgcacaggaaattgcactcacaagccaaagcagagagaaaggttttgagccgcggcatcaagcgctccctcccagcacacggtgctggaacagactcattcactgtcagcaaaccacccaatacgtacccctggggcctttaatttcttcttttgacaaacgactctgacatttaaaagctacagggacaagttagtaacaggcactaaaaagagactcaatgtctgcaattggttaactggcgcttacgggtactggctacattcccctaccaacccttggcgaatcggctccttgaaatagttacgagacgagcagcagcatgggggaccctggacgagccctttgtctcgtcctcccacggggaaacgggccagagggaggagtgcctgtccccagctcacgcactgacctggaactgcagccaggaaaggagccagccctggaaggtccagggccctagctctccccactaggtgtcctggcccagcctgtggtgggagggagccgagactgcaggcgaggggcgtccccagtgaatcccacccagaagaggaccccatggggctccctcagggctaccaccagggcctgtgggttgccaccctctggcctgtttgccagccatgtgaccaacatggctttctgctccaggactctgggttggccctgagtggctcaccgacagcaggtggtaccaatgactgacaggtggacagacaggctgatgaataggggacacgtgctgagtggagaagcagcccgacagtgctgggcgctggccactgggaggcacttacatacgtcagcttgcagaccgcgttcgccttcaccgctatgttgtcctgcttcagctcctgcttgatctcatcaatgcactgagatatgtattttgcctataatgggggataaacacagagat[142 bp omitted]aaccccgcctctactaaaaatacaaaaattagctgggcgtggtggcgggcgcctgtaatcccagctactcaggaggctaaggcaggagaatcgtttaaacctgggaggcagaggttgcactgagccaagatgacaccactgcattccagcccaggtgagagagccagactccgtctcaaaaaaaaaaaaaaaaaaaaaaaaaaaggaaagaagccaggcataagagagagcacaccgtgtaatccatttctatgaaatgtccagatcaggccaatccagagacaggaaggggattcgtgggtgccacaggctgggagaggagacgggagggttcgctttctttctaggctgataatgttctggaacttggccgtggtggtggcgcacagcattccgctatacacgccccaccgtttgccaactccttggtggacgaacatgtggggccttcccaccttcagccagggtgactctcactgctgtgaaaaccacactcaggttttgaggggatgtgtctggtgtgtctggatccccctgggcctgctcactaactgcgcgtgtctccagaacaccatcaaggacaattctgacccaagcgaactcaggcacgaggtccagaatggcagacaaggttcccaagggacaggcagacgtgaggcgcccaacatagcaccagagacaagccgagtcgatgccatgctggccccagagacaacccaccccacctggaaggagaggagggagcagcagaggcttggagtgcctccatcagtgaacgatgaggcacccacaagccctcctaatgcacaggagcccctctccatcatccgacaggtcaggagtgacggctgcccgggccccgtcctgccagcccctacgtcgggatgcaatgttcctcctgctgtgcccaccagaggcaaggatggcaagcccaccccatcacgcttctgtcctcagccccactgtagctggcctcgaagcagccccaggagtacccaccactcatgtgtcacccaggaccacaccccaacctcggctgccagctgcaccgggctggggaaggagacacagctgtgggggagtgggggggtgggggagggcacagacacataatattttcctccatgctttatgatccaactttgtacaatggaaagagtgccacccgatcctccagacgggcttcaaattactacacctcaccccaggactgtgctcccatccccggagcaaggataacccactcctcctgctcaaagggtcaggactgttgatttaaaaggaaaagaacaaaaagaccatcccaggcgtggagaggtcagaccctcacgagggcaaaggggatgtcaaacggcgcggctgctgtggaaagcagcctggggttcctccacggttccatgtggagttaccgccccagcaattccacttctgggcgtgcacccgaggggatggaaaacaggtgtccaaacaaaaacaagcacacgaacacacagggcagcaccatttctagtggcctgaaacaggaacagcccccacgctcgccgctgatgaatggatacacaccatgtggtgggtctgctccagtcaacttgcttgactttttttttttttgagacagggtctcactctgtcgcccaggctggagtgcagtggtgagatcactgctcactgcagcctccacaccccagactcaagtgatcctccccgctagcctcccaaagcactgggaccacaggtgtgcgccaccacgcccagccactagtcagctttctaggaactcggcagtgggtcacaaccctgggactccctcttggcttttaacttctgataaagtccaagtagctcctctcagaccaagcctcacacaaacgtcttttttttttttttttttttttgagacggagtctcgctctgatgccaggctggagtgcagtggcacaatctcggctcactgcaaccttcacctcccaggttcaagtgattctcctggctcagcctcctgagtagctaggattacaggggcacaccaccatgcccagctaattcttgtatttttggtagagacggggtttcgccacgttggccaggctggtctcgaattcctgacctcaggtgatctgctcgcctcagcctcccaaagtgccaggataacaggcatgagccactgcgcccggcctgaattagaaaaaaaatgtattagttggggtagggagacatgacctagacccaaaagattatattataaacatagatgtaaattagctgaagctataatgtggctatacatcattgacactttctacaaaaacaccgggaaatcagaggagcaacatggtgaaatttctcaaacacctcagctagttccacactaaattcacacttcaccacacagcaagtgagatactaaaacaatgatgctggtctcagcatctatttaattctgggatgtaatttagaacacagggtgcgtatttcctttatacactaagtcctcaggactgcagtaagacaggccatttaaaccctagatacacaggaaaactccctggggtacttttttttttttttttttaatggagtcttgctctgtcaccaggctggagtgcagtggtacgatctcggctcactgcaacctccgcctctcggttcaagtgattcaagtgattctcctgcctcagcctcccgagtggctacgattacaggtacacaccaccacgcccagctaatttttgcatttttagcagagacaggatttcaccattttg[132 bp omitted]cacaggctaaagtgcagtggcctaaccatggctaactgcagcctcaacctcccaggctcaagagattctcccacctcagtatttgggagtacagtaaatagctgggattacagggccatgccaccatattgggcgaatttttaaaattatatatatttatatatatttatttttgcatatatttatgtatatacttgtttacatatatatacatttatttacatatatgtttatttatatatatatatgtatcttttgagacagagttttgctcgtcgcccatgctggagtgcagtggtgtgatctcggctcactgtaacctccgcctcccgggttcaagcaattctcctgcctcagccttcccagtagctggggttacaagcaggtactaccacgcctggctaatttctatatttttagagggggtttagccatgttggccaggctggtcttgaactcctgacctcaagtaattcgccagcctcagcctcccaaagtgctgggatttacaggtgtgagctactgcacccgacctaacattttttacttttgtagagttggggtctcactatgttgcccaggctggtcttgaactcctggcctcaagtgatcctcccaccttggcctcccacagtgctgggattaaaggtgtgagccaccgcacctggctggcgctttttctagttttaaacttccgattctcagtccttcgcctccaatgaattaagtcagcatcttgagaccagggaggccacatggtcacaacctcagcagctgattctcaggtgctgtccagttcaaagaccaacgagctgagcccttggcacatcccacggtgctttccacgtggccgcctggctgaggggagccgggccgctgagccgcatgcaggctgagggcctgggagctcacccagctcatgagagcaaagcccggtccccctcaccccaatgggggctctgaggggttttttctgttttttttttttctttttttatttgagacagagtttcactcttgttgcccaggctggagtacaatggtgtgatcttggctcaccacaacctccgcctcccaagctcaagtgtgattctcctgtctcagcctcccaagtagctgggattacaggcacgagccaccacgccaagctaattttatatttttagtagagacagggtttctccatgttggccaggctgatctcgaactcccgacctcaggtgatctgcccacctcggcctcccaaagtgcggggattacaggagtgagccaccacgcccagcctctttttcttttttttctgagatggagtctcactctatcgtccaagttggagtgcagtggtatgatctctgctcactgcaaactccacctcccaggttgaagtgattctcctgcctcagc[136 bp omitted]aagctccacctcctgggttcatgccattctcctgcctcagcctcccaagtagctgggactacaggcgcccgcgaccatgcctggctaattttttgtatttttagtagagacgggatttcgccgtgttag[132 bp omitted]tttgaagccctgtttcaaaaaaatcaaaaaataaaaaattagctgggcgtggtggcacatcgtgtagtcacagctacttgcaaggttgaggtaagaggattgattaagcccaggaagtcaatgctgtagggggccgcgatcgcaccactgcactccagcctgggcaacagag[161 bp omitted]cccatctccgctaaaaatacaaaattagccggggtggtggctcgcacctgtaatcccagctactcgggaggctgaggcaagagaatcgcttgcacccgggaggcagacgttgcggtgagccgagatcgcgccattgcacttcagcctgggcaacaagagtgaaactccgtctcaaaaaaaaaaaaaaagaattccaagtcccaacagtaactgagtcaggaaaggggacgcgccggcgaagtggtccatcctgcccaggataagttactatccacaatcaccatcacttcgaattcaaacagaaaagccaccaaaccccagaaccccagaagcagcatgaaaggagcttctcctgcggagcgctctgctctttcaacagcccgggacaccgtcctgctttattctcttgttgtggacaggctcaacgccctctgcacccaggagcagagcggccgcggccaccctgaggcagcatggaaccgaggcccccacaccgggacctacctccactcccacaactgaggctggtgcagcacactaacacgcaacagggcagaaaccagaaacagccccatccaggaccagaccccggccagccctgcctagtccagccccagcccgtctctgtgctcagtcctgtaacttgcggcccctcagctcagcctggatgtctgtggggtggcacggtcaccattaaaaccctctgagtcaaggcggggcacaatggctcacacctgtaatcccagcactttgggaggccgagcagatcacttgaggtcaggggtttgagaccagcttggtcaacatggtgaaacaccgtctccactaaaaatacaaaaattagcttggtatggtggtgcatgcctgtaatcccagctactcaggaggctgaggcaggagaattgcttgaacctgggaggaagaggctgcagtgagccaagatcgcaccactgcactccagcctgggcgacagagggagactatgtctccaaaaacaaacaaacaaacaaacaaaacaaaaacgcttctggctcaaatccacagagacagcaggtcagtggtcgccagggcataggtttctctgttctgaacgtattgtgctgaatcactgcacgtttgtaaatatactgaaatctacttcatttcatgcctagaacaggcagattttgtggcatgtaaattatatctcaactgttcaaagaaaggaaccaccttggctcagcagcatcacaggacaggacaaaacaccaggaaggacgtgaggctccatctggaccgcagctccctgagggctggaggcctgggcagagcagaggagggtcctcaggccccagtcacagatgagcaggagcattagggaccactcagcacagagtgggccacatggtggatgcccagcaggccacccggggtccccacatccctccgcctgtctcactgccacgtggacaaatcagccaccagccagtccaagaactcctaaggcagtggttcccagcaggtgactctgcccctccaggggacactgggcgatgtatgcagcatctgtggttgccacgacttgcagatatctaggcatggagtgggtggaggccgggtacgctgctcagtgccctgcagtgccccaacacccccaccccaagaacaatccagcctgatgtccacagtgccacggctgggccagagcacacccagggctggcgtcgccgctcctgccctctggtcttcctggctctccaaagctcaacgcaagtgagcatcacccagaagctggttacaagggcagaactcacccccacccacatgcccctccaggacccacatgcctcggccttgaagccacctccacacacacacaccaagccttctgcccagagattgccttttgaaaacccctgcaaaggagtaaaatagacaaagaggcccaagcctctttgaagagagagcttcaggaagaacgcaagcggctaaacgcctgtgaatgagtgaaccgcactcataagcagggcagctgacactacagctgcaccccccaaacaccccagccctgctggtggtgcgggaggcgaggctgcggctttcatgcttgctgctgggagaagctctgtggggagcgggcgctttcctgagggcctctacggcttgagtccattcataaaacgaccccacatggaaaccacccacatgtccgactatgtatggaagctgtgtgtaaacaacagagcacagccacccacgtcaaggaccgaggacagctccctccccaccatgacggctgcaaagcacacacaccttaggcaatcacgcctatggttcagggacacaaatttaagtgataaaactacaagcaagtcaaggaaattaaacttacagaagtcaggatcattaccataataattagctgtacaggccgggcacactggctcacgcctgccatcccagcactttgggaggccaaggtgggtgggttacttgaggtcaggagtttgagaccagcctggccgatacagtgaaaccccgtctctgctaaaaatacaaaaattagccaggtgtgatggcggccacctgtaatcccagctacttcggaggctgaggcaggagaatcacttgaacccaggaggcagaggttgcagtgagccaagattgtgccgctgcattccagcctgggtgacagacggagcaagaccctgtctcaaaaaaaaaaaaaaaaaaaagccgtacaatgtcctatgcactgcatattttgcaatcaaagcagctcagagggaaaacaaagcacatttagaatccacgccctctggtccaccaccaccgtgacagcacgggggacgagggcacctggacaacagggacgcattcgggaattctgggagacttttcttaccatcaaggggggtcaggggcttttaatttggggttgattctacctccaagagacattctggtctgggcacacctgtggctggcatgaccagaggagcccctggcacggagtgggtgggggcggggatgctgctcagcaccctgtagtgcccagaatagctctacccagagaatgatccagccccaacatccacagtggtgaggggcagacgctgatctagtggaatgactgacgttattaaaaggagagaaaacccgctcagttcggctgggcgtggtggctcacgcctgtcatcccagctctttgggaggccgaggc[131 bp omitted]aggcaggagaattgcttgaacctgggaggcggaggttgcggtgagccgagatcgcgccattgcactccagcctgggcaacaagagcaaaactctgtctcaaaaaaaaaaaaaaaaaaagaaaagaaaacacactcagttcaaatttaatctctttatatcttttcctttcttttttttttttttttagttggagtccgctggggaggctgaggcagggagaactgcttgaacccaggaggcggaacttgcagtgagccaagattgtgccactgcactccagcctgggcaacacagcgagactctgacttggaaaaaaaacaagaagaagaaaaaaaaaacaaaaaagaaaaaagaaaaagaatatatgggctgggcacagtggctcaccctgtaatcccagcactttgggaggcaaaggtgggcagatcacgaggtcaagagattgagaccatactggccaacatggggaaaccccatctctactaaaaatacaaaaattagctggatgtggtggcactcgcctgttgtcccagctgcttgggaggttgagtcacttgaacctgggaggtggaggttgcagtgagccgagatcgtgccactgcactccagcctggcgacagagcgagacttagtctcaaaaaaaaaaagaaaaaaaggctgggcaccgtggctcacacctgtaatccagcactttgggaggccgaggcgggaggatcacgaggacaggagattgagaccacggtgaaagcccatctctactaaaaatacaaaaaattagacgggcgtggtggcgggaggctgaggcaggagaatggcgtgaacccgggaggcacagcttgcagtgagcccagatcgcaccactgcactgcagcctgggggacagagcaagactccgtctcaaaaaaaaaaaaaaaaagaaaaagaaaaaatggagaaaactttcccaaaactatgaaaaggacttgtgagaacaaaatattaaaagtcgtttgttttttgtgccaattctatcgagctttagaagctgaggacactcccaagtggaccaagacacatacacatgagaccactacttctcacgctttttggactcatcttaataggttttgcatgggaacccgatacgtttacacgtacacacaagtatcacatgcagaaatcaaagtttcaggacaggacggttactgtatgtgcctgcactctggtctcttctagtttcttttcctttttcttacctagcataaccattaaattgaattcacaacccacaaagaggtcacagcctgaggactggaaaacagtgaactagacaacctcagcgctctggcgcttccagaaaaccgcgtgtcactgcagcatcctccgcatcatccagcaaggagggaggtgactgtcatccccatttacaagggaggagacagagcagggggctctagatgggccgccccatgaagtcagccagtcagcccaagcacctggactcggatctcccaaacctcatgcgatttctactccatcgcactgcctttccacgtggctttcaaagtcattgctaagccttgtttccatgatgccacactcaagttttaggtgaaaatctattacgaaatggaaactttttttggaaactatactgctgcagaaaatgcgcacactgtctagagtctttgttccgggtgcagtgggcgggagggaagaacctacaacatacggtctataggatagctgctttttcaaagtgagtgggggtgctggaggtacaactagaactgtcattgaacagtcatttgctgctctccaatcaggagactccagcagctgcagagaacatccagaatcagacatgaacacctgagttaccaccctctggaccataacaatcgtcttccagtgagaaagccagggtccccagacactgcgtgtcctgcctgaaatcacccacccgccaatggcagggccaatgaggaagcctgggactttcaaggacaaccctgcgccgttttaaaaatgtttcccagccgggtgcagtggctcacgcctgtaattctaacactctgggaggctaaggcgggtggatcactgaggtcaggagtttgagaccagcccgaccaacatggtgaaaccctgtctctactaaaaatacaaaattagctgggtgtggtggtgcatgcctgtaatcccagctactcaggagctggggcaggagaatcgcttgaacctgggaggtgaaggttgtggtgagccaagatcatgcctctgcactccggcctgggcaacaagagtgaaactccgtctcaaaaaaaaaaaaaaaaagtttccaccaccaagacccccttgaaggggcccagacttgtggggaaggcgctatcaactcacaccaattccaaaggaagaaaaccaggctcaggggcttcccagtgaagacaggcacatccccctgaaaaccatgccccagactagaggtgtggtcctccactggacagaccccctggcccatcgtcagggtcccagaacaggctgctcagtgacatgcgctgaagggagcagggacgggcgctgggagatcctgcctgtgcagaaaaagtcctctcgggaagtgaaccacatttccaatctgaaccaagctcagtaaaaaccaggcccatcagcgatgctttcaactcacaaagaatctgaacattactccagttagttacacgttgtaaccaaagcagttagggagagcttctgagatgaagaaaaccaaggaggccgaagggaagtggggtggagaagaacaaaaatgacctcattaaggtgggggcaggcgaagccacaccacttccaggaaagtgtaaaggtgtaacaatacggcaagagctcgggttcccagagagagggacatgggctgagggacatggtgccaggaagcaagtcccttaacttccctgccctcctgggcacctcgtcctggacacagcctctggtactgggactggtgcggtatcagacggcggctctctttcaggcctgccttgctgtccacgcagggaagcaggcaggcagtcgctcaagtaggacactttctaaggctcccactgcccaagggctgcacgggtatccttaatgaagccagacacgtggtggccactctgcccattcttcttcaatctaggtcacaggttgggggaagggaggagcgggaaggaaacgatccccacggttgtaattttacttctggaaaactatttcctcgccctggctttcaggttcctacttgaagtcagcttccccattccagcttcccgcaagctgctacctcactggggatcaggatgccgctgtccttcctccctcctggcagcagccccaccttcctgggaacgggggcactggaggcaacgccccaagaccctgcctggttccgagccaggcctcagggagcgacctggacacgcatttacacgacccagaaggaagaaggagtttctccagggacggcccaggaccccctgcctcggtctcccggggagggtccgggggcggggcccgggcccctgcatttttaatcggtgattcggaaacacactcaggttgaagaagctctgcccagagacctcgcaagtctcctgggagggtggcccgagacgggggcaggtgggcccgaatctccctctgagagagtaaactgagggtccagggggagggcacctataggcggggcccagggcattgcattttgaacagcgcttcccccaggtgatccgatgaggcgaggatccgagatgtgctgctccaaggccttcgcccctcgtggggaaactgatgctgggggaccgaggaggtgggcggcgccccaggcccaggccaggcagggccggagccctaagcgggacctccaactaagacagagcccgggcgggcggcaggccgagcaggcccagtgagcagggctgggccctgggccggggctgtgaccaggccgagcagccccttggcgcgccgggctcacctcgtcctccttgtggttacggatgccgcggaccaagtcctgcagattcttgtcgaacatgcggtcgatgctgcccttcaccatcttgagggccatcgcggcggcccacgggcttttgcctcgggaggcccgcggctgggcgccgtgagggggcccggggcccgtgcctgccgcccgcggagcgccgcgctgccggccgctgcggcggggcaagctcccaggccagggcggcggcggggtccaaggaccgcggcagaggcggcgacccgctcggcaggtgccgcgatcccgctccgggccccttgcaaatggcggacaagatggcggcgggtcagctgacgacgagcgcccggtcccagccgagccggccccggaagccccgcctcccagaaagccccgccccgccacctccccggcagggagacgctgcgtttccctgacgacgacaggtagtccaatggaaatgtggcacctctttctcctgcgcgcggccccgccttttccggccccaaaacttgcgctctcattggtcagtggcctccggaactccgccttcttcctagttctgagccctagccacgccccttagaggctggtcctgaccctcccaccagctgacaggtgtgagcgtggctggatgtgggcggggcgcccacgtggagcttagccggcaagttcccgaggaagactggagctccgcctttcctgaatgtaatagctgacgcggcctgagagcctccaaacccaactcctgggtgggtgggggaacggatcctgtggttcccgcagcctcacaacatcctgtgaaatgggcaagacagacattaacatgcccacaggaagaaaatgaggccagagacaggactacgacattgtcattcattcagtaaacatttgtcgaaggcccattgtgtgccaggcatggtaaggggtgctgggcatgcagcggtaaatgagatatactgagtccctgccttccga[131 bp omitted]aggccaacatggtgaaaccctgtctctactaaaaatacaaaaactagctgggtgtgatggtgggcacctgtaatcccagctattcgggagggtgagtcaggagaatcccttgaaaccagaaggcagaggttgcagtgagccgagatggcgccactgcactccagcctggcaacagagcaagactccgtctaaaaaaaaaagagagggagaaagaaa[132 bp omitted]aaccccatctctactaaaaatacaaaaattagccgggcgtggtggcatgcacctgtaatcccagctacttgggaggctgaggcagaagaatctcttgaacccaggaggcagaggttgcagtgagccgagatcgcgccactgcactgtactctgggcaacagagcgagactcttgtctcaaaaaaacaaaacaaaccaaaaaaactggggtaagatatttacaatacatatatctgacaaatgacttatatcctggtggggcaggatggctgacacctgtaaaatcccagagtttaggaagaattgcttgagcccaggagataaaggacagctagagcaatatagtcagacacccatcttaaaaaaaaaaaaaaaaaaaggcagggggaggggaggatgggcgcagtggttcaaaccagtaattccagcacttcgggaggcctaaagggacagatcacatgaggtcaggagttcgagaccagcctggccaacatgatgaaagcccatctctactaaaaattaaaaaattagccagacgtggtggagggcacctgtaattccagccacttgggagactgaggcaggagaatgacatgagtccaggaggcagaggttgcagtgagctgagattgcgccactgcactctaggctgggcaaaagagcgaaacatggtctcaaaaaagaagtggggggggggaccgggcacagcggttcacgcctataaccccagcacttcgggaggccgaggaggacagatcacttgaggtcaggagtttgagaccagcgtggccaacatggtgaaattccacctctactaaaaatacaaaaattagtcaggcatggttgtgggcacctgtaatcccagctattggggaggctgaggcaggagaatggctccgcccagggggcggaggttgcagtgagctgagattgccccattacactcaagcctgggagacagagcaagattccgtctcaaaaaaaaaaaaaaaaggaggggaactgctgggcatggtggctccatatctttggaggatgtattcatgcatttctatcgggaacagtagaggaatcgctgggtaatagaatatgtgtgcgttagcattgcaagctagtgctaaacagtttccgggcgtccttgtgatttctttcccctcgcccgagatagagtcttgctctgtagcccaggctggaatgca[139 bp omitted]ctcctgggttcaagcaattctcctgcctcagcctcccgagtagctgggattacagctgcccaccaccacctccagctaatttttgtatttttagtagagactgggtttcaccatgttggccaggctggcctcaaactactgacctcaggtgatccgccttccttggcctccccaaagtgctggaattacaggtgtgagccactgcaccagcctcagaaatatttatttatttatttatggttttttttttctttttttttttttgagacagtctcattctgtcaccagggctggagtgcagtggctcaatcttggctcactgcaacctccacctccctagttcaagcgattctcctgcctcagcttcctgaatagctgggactacaggcgctcgccaccacgcccagctaatttttgtattttagtagagacagggtttcaccatgttggccaggatggtctcgatctcttgacctcgtgatctgcctgcttcagcctcccaaagtgctgggaatacagtcgtgagccaccacgccccatcctatttataggttctttagtcctcaggcgaagccctagggaaacagaatttctctctccactttctgtcccttttcactgcccaaggcaggactctaatctgattgggagcccaaacacctcattccagagaaggtcatgccccataccctggaggaagaaaagctacagagagaccaagacaaatctggacagacaggccctgcctggctccccagtcagtctattcatatgagatcatactaatttttggcccaattacgtttctttatgattgtgagtcatgtctgtttaatgaagctgccattaaaacccaaaaggaggccaggcggggcggccagtgcctgcattcccagcacttccggaggctgaggtgggtggatcacctgaggtcaggagttggagaccatcctggcgaacatggtgaaaccctgactctattaaaagtacaaaaattagccgggcgtggtggcgagcacctgtaatcccagctacttccggaggctgaggcaggagaattgcttgaacccaggaggtggaggttgcagtgagccgagatcgcgccattgcactccagcctgggtgacaagagcaaaactctctcaaataaatgaaaataaaaataaaaaaacaaaattagccaggcgtggttgccatacctgtagtcccatctactcagggaggctgagg[131 bp omitted]tgtgtcacacacctgtaatcccagctactcagaaggctgaggcaggagaatcacttgtatccaggaggt[141 bp omitted]attttccaacacactgtgttttctacctagcattttgtttattattggtctccacctcctcctcccacctgaacacaaattctatgatattgggactttgtccttttgttttctgtatgggtggacatttaaaaaatgtttaacttgatgaaaaaggaagaatgggccgggcgcggtggctcacggctgacatgccagcactctgggaggccgaggtgggcggatcaggaggtcaggagattgagaccatcctggctaacacggtgaaacaccatctctactaaaaatacaaaaaaattagcccggcttggtggcgggcgcctgtagtcccagctactcgggaggctgaggcaggagaatggcgtgtacccgggaggcggagcttgcagtgagccacgattgcgccactgcactccagcctggacgacagagcgagactccgtctcaaaaaaaaaaaaaaagaaaaaagaaaaaggaagaatggttttgacaagagtgctgattcttccatcactgggagttggtgggctggctgcaacctccagggtgaccagcagagagcagtgctagccaggctcaaagtaggggcagcttctctctggaaagatcctggcctggagccctgagctctggcaggagatggggacatttgtcatcagtcctagctccagcccgaatcagttaccttgtccccaaattatccatcctttcatccatccttccacctccccatccacccagccacatatcaaatcatccattcatacatacatacatctacccacccatcatccatccatccaccaatccactcatgcatccattcacccactcttccatctatccatccacctacctatccattcacccatccaccgatccactcacccactaacccatccatccacccacccacccatccatccacccaccaatcaacaacgtttattgaaaaaaaacagggcagggcgcggtggctcacgcctgtaatcccagccctttgggaggttg[132 bp omitted]gaggcaggagaatcgcttgaacctggcagttggaggttgcagtgagccaagattgcaccactgcactccagcctgatgacagagcgagactctgtctcaaaaaactaaataaataaaacaaaactaaacaaaaaacaaacagccacccacccatccacccacccacctatccacccacccatctatccattcacccatccacgaatccatccatttatccatccatctacccatccacccatcaacaaggtttgttgaaaaaaacaaacatacacccatctatcattcatccatccacccatctgtcatccatccatccacccatccatctatcgatctatccacccatcatccatccatccatcc[370 bp omitted]tatccagccaaccatccacctatccacccatacagtaacccatccatccatccatccatccatccatccatctacccatctacccatccacccatccacccaccgactcatccatccacccacccactaacccatccacccacccacccatccacccatcaacgttagttgaaaaaaacaaacatccacccacccatccatccccatccacccatccacccacccatcaaccaacccacccatccacccatccatccattcaacaacatactgagtatctactgtatgccactttggcaaggagcaggaatggagaacaaagctgtaggcagcagcaggattggggaaaagtgatccaggcagatgtcaggacaaatggaagagcttgctcaagtttgtcatgtggaggagcagagaggagactggcaaggatagtggtgatggaggaaattgagcttgatgggttgataaaggacacattagacatcattctacagaagcattcatttagcaactatgttgtaccccacatgtgctctttttttttcttccctccacggctcagcagaattttgtttgtttgtttttgagacagagtcttgctctgtcgcccaggctgcagtgcagtggtgcgatctcggctcactgcaagctccacctcctgggttcacgccattctcctgcctcagcctttccagtagctgggactacaggcacccgccaccacgcccggctaattttttcgtatttttagtagagacggggttt[132 bp omitted]ttgctctgttccctgggttgtagtggagtggcaccatctgagctcactgcagcctcaactcctgggctcaagcaggggcccagctactttttgtgtattttttgtagataatgggtctcactatattgcccaggctgatctagaactcctggcctcaagttgtcctcccaccttggcctcccaaagtgctaggattacaagcctgagccaccgatcccagctcttttttttttttttgagatggagattcgctcttgtcacccaggctggagtgcaacggcgcaatccgcttactgcaacctccgcctcccaggttcaaacgattctcttgcctcagcttccctaggagccaccaccacacccagcatgaaccataatttctaatctccttgctaatctgttagtcctgcaaaggcagtctagtccccaggcaagaaaggagtttgtttggggaaagctgttaccgtctttgtttcaaagttaaactataaactaagttactcccaaaattagtttggcctgagcccaggaatgaacaaggacagcttggaggttagaagcaaaatggagtcgtctaggtcagatctctttcactgtcaacattttctgttataatttttttttttaatggagtctagatctgtcaccaggctagagtgcagtggtgtgatcttggctcactgcaacctccgactccgggctcaagtgattctcctgcctcagcctcccgagtagctgggattacaggcacacaccaccaggccaggctaatttttttatttttagtagagacggggtttcaccatgttggccacgatggtttccatctctctctctttttttttttttttgagacggagtctccctctgtcacccaggctggagtgcaatggcgcgatctcagctcactacaacctccgcctcccaggttcaagcgattctcctgcctcagcctcccgagcagccgggattacaggcatgcgccaccatgcctagctaattttttttgttttttttttttgagacggagtctcgctctgtggcccaggctggagtgcggtggcgcgatctcagctcaccgcaagctccgcctcccgggttcaagcgattctcccgcctc[168 bp omitted]caccgtgcccggccgcctagctaatttttgtatttttttttttttgagacggagtcttgttctgtctcccaggctggagtgcagtggcgctatcttggttcactgcaagctccacctcccaggttcatgccattctcttgcctcagcctccagagtagct[136 bp omitted]cctcccaaagtgctgggattgcaggcattagccactgcgcctggccattttgtatttttttagtagagacggggtttcaccatgttggtcaggctggtattgaactcctgacctcatgatctgcccgcctcagcctcccaaagtgctggaattacaggcgtgagccaccgtgcccagccttctaatttttgcaaaggcagtttcaaacctgtaacaggaactatgggaatgaccagaggaaatggctcaggaaagagatgtacaaaagtgggaggaggccaggtgtggtggctcaagcctgtaatcccagcaccttgggagaccaaagcagggtggatagcctgaggtcaggagttcgagaccagcctagccaacatggtgaaaccccatctctactaaaaatacaaaaatcagccgggagtggtggcgcatgcctgtaatccccgctactcgggaggctgaggcaggagaatcgaatcgcttgaaaccaggaggcgggggttgcagtaagccaagatcacaccattgcactttagcctaatgacagagctagactcctccgtctcaaaaaaaaaaaagtgggcggagatacaggttgccacacctggagtccagtccatcctccaccagctcccagtagcctatgggaggggcacaggcattggtccattcatccccaaagtgtgtcttagcccggataacctgtactcagtgatcctgaggatatagatagagtgcctgcctacacaggattctggagaaatcaactgttcagaataatgttagaccaggatctctcccctggagaaccacggacatcagggccagattgttctctggggtgggctatcctgggcactgcagggtggtaagcagcgtccgtggcctccacccactccatgccaggagcttccttgcaccttagctgtgacaatcacaaatgttcccagacatcgcccagtgtttcctgggtgcagaatcacccctggttgagaccgcctgggtaagggattccaagagcccccaagagactgcatcccatgatccaccaccctgctgaggtcccaggaggctgcccacattgaaatccacaccctgagtgggtagggagagagaggaggtgagtcctaggaccc[135 bp omitted]cacctccgcctcccaggttcaagccattctgttgcctcagcctcccgagtagctgggattacaggtgcctgccaccatgcctggctaatttttgcacttttagtagagacggggtttcaccatg[132 bp omitted]ttagataaaagttctttttttttccacaaggaaaataatgtcaaggtcaaaataagtatgtagagatgaatctctaaagttaatgttttatttggcaagaaagaattggaatttgaggcatacatgcagaccaaagaggagtctggggttttatagaaaaagaggagtgtggctgggcatgatggtttatgcctgtaatcccagcacttaggaaggctgaggtgggaatataacttgagatcaagagttcgagaccagcctggccaacatggcgagaccctatctctactaaaaatacaaaaattagctgggcacaatagtgggcacttagaatcccagctacttgggaggctgaggcgggagaatcgctggaacctaggaggcgctggttgtagtgactggagatcccagtcactactccagcctaggcgagagtaagactatgtcaataaataaataaataaataaataaaaagaccagcctgggttacatagcaggaccgcatctttccaacaacaaagaaaaagcccattgagttttttttttttttttttttgagacacagtctcactctgtcgcccaggctggagtgcagtggcacgatctcgggtcactgcagcctctgcctcccggactcaagtgatttctcctgcctc[198 bp omitted]tcaacactaaaggggccgggtgcggtggctgatgcctataaatctccgaatttcgaatttcgggaggctgaggagggcggatcacttgagtttgagattaggagttagagaccagcctggccaacatggcggaaatgcatctctactaaaactacaaaaattaaccgggcgtggtgactcgtgcctgtagtcccagctactcgggaggctgaggcag[136 bp omitted]gtacaaggcacttgtacttgacactgaaaggctttaatcaccaggggctgtggcagtgactgcgggactctattgctgagaggaggaaagcatcggaggtcaagtgactctcccaacgtcacccagcagggaaggggtggggcagggctggaatctggctgggcagggagggtgttggtgtcccccggggacttggggaggtgctggtggtgaaaccgcctttgcaaaattatgactgagacagttaaagagatctaacttcaccgactccctcttccttctaacctccaagctgtccttgttcatccctgggcataggctgaactaactttgggagaaacttatagtttaattaaattaattaattaattaattaattatttttttgagacggagtcttgctctgttgcccaggccggagtgcagtggtgcaatatcggctcactgcaacctctgcctcctgggttcaagcgattctcctacctcagcccccgcagtagctgggattacaggcgcccgccaccgcgcccagctaatttttgtatttttaatagagacagggtttcaccatgttggccaggctgatctcgaactcctgacctcaggtgatcttcccgcctcggcctcacaaagtgctgggattacaggcatgagccagggctcctggccgtgagagggggtttctccatgttggtcaggctggtctcgaactcctgacctcaggtgatctgcccgccttggcctcccaaagtgctgggattacaggggtgaatcaccgcgcctggcctttttttttttttttgtacccaataaacagcattgttgtcgaatgaatactggacttggagctacagcaagtcctggaccgtgactcttatggggggaaattcggatttttggttttactaagccgtgtgtggggaggtgtccggcgtcctcctcctgggacgggattcgaacccgctatccgacgggcccgcccacagggtctccccgggtccccgcttcgggccggcgagtgggggaaggggtcggccgagggcaaccgaggacgtgcgtgcgtacgttcgtgcgtgcgtggattcgggcgggcgggcgagtccacggggcggggcgccgagggggtggcgcgcgcgggtcggcccgctgggcggcgggcacgcgccggcgtcttcgctccgggctcccctagcgcgcggggcgagtggttccgcccggcccccggctcattgtgctcgcttcacgccggcccaagatggcggaggcgctggaggccccgggcctgtgactacaaagagggagtcgggggccgggccggaccggagcgcggcggcggcggcggcggcggccgaggccgaggccaggccccctcccctcagcctcccgcccctccctcccgcccgccctcctccgcccaccggcggccccgcccctcccccaaccgcccgcctagcatggtgcggcggccgcgcgcgcggacatgggggagaagctggagctgagactgaagtcgcccgtgggggctgagcccgccgtctacccgtggccgctgccggtctacgtgagtgccgccctccaccgtccctacctcccggcctcccctcctccgccgcccctggggacaccccaaacccccccaagccgcgctcaccggtcccccctgcggaacggagaccctggactccactgtcgctgctccacccccgttgcttcccggccgagggccccgcggctgtttcccgcagggtgggagccccgcgcgcctggggtgggagcgggagccggcgcccccgagccctaccgcggtgccgttgcccccgccgggctgtcccgggcgcggaacggaaggggtaactcgtgccggccgcgttttgactggaagcccgcccgcccgccccgctcgttcccggcgctgtcagtgtgtccgccgccttatttttctttttgagggcatcctttcctgtctcctcttctcttctttttaaaaattgggcgtttgtcacgcttttcctactcgggcacggcgggcccgaccctgcgaaggtgggagttaacgtccccttgagtgggcgggagcggtctgacctttggaaatggggaatttttgtccccgtaattttgagtgggtatgggctgccctggccctgggaaattaggcatctttgacctgttaatcctagttggttggggacaggctttatttatccttggaaattgggacttctccccgatcttgagtgggcaggattgggctcacccccggagttagtaaattttgtcttcttcatcttggtgaccgttggaaaatgacaggccgggtggaatgttacagaggcaccccaccgggtggttccagaaacccgcgtgcggctcccggggtgcgagtcccggcgtggcccctgaggaggcggggcgcgtgcgtccgcgcttgggaccctctggccacgctccgggctgggcagggcgcgttttcggggaaaagtgaagcaggcgctgtcagcgagcgtgtccggggcgcgagttttggggggcgcgtctgcagggcccggccgggcatccccgcgcgccctgggactcccgcgcgcgctgggcttgtgtcagtttttggaaacgtgctcgctgggggcggggtcaggacgcggagagcgctggggagcccgggctggctcactgccccgggtcggtgcgagtggatgggagagggagcgcagcttccagcctggccgcacgtcccgcgcgcggggctggcggggtagggccctggggctctggcttctctggttgggcagctccgggtgtgcgcctgggcggcctgagccgggatcccgccaggagaggtcctaggacaaaaactgaaagcagaggccgcgcttcagcgccccgaccggtttcctccctcgaaagttcaaactccagaacccttccagcctccacttctctctgttgggctctcatcgttttaggtggtagaaggcatatgaccataagagttctaactgtaactgactgaagatcaattgaggtggcttaccaccgtccgaccagccccagtacatggcttcacatttttttttttttttttgagacggagtctcgatctgtcgccaaagctggagtgcagcggcgcgatctcggctcgctgcaagctccgcctcccgggttcacgccattctcctgcctcagcctccccagtagctaggactataggcgcccgccaccacgcccggctaatgttttttgtgtttttagtagagacggggttt[131 bp omitted]atgttgttatttttggagtcggagtttcgctcttgttgcccaggctggagtgcaatggtgcgatctcggctcactgaaacctcagcctcccgggttcaagcgattctcctgcctcggcctccctggtaggtgggattacaggcatgcgccaccacaccctgctaattttgtatttttagtagagacggggtttc[133 bp omitted]tttgagaggaagtgttgcttttgttgcccagactggagtgcagtggtgccatctctgctcactgcatcgtctgcctcccgggttcaagcgattctcctgcctcagcctcctgagtagctgggattactggcatgagccaccacgtccggctaattttgtatttttagtagataccaggtttcttcatgttggctaggctggtctcgaactcctaacctcaggtgatccgcctgccttggcttcccaaagtgccgggattacaggggtgagccaccgcacctggcctcacatttattcgtatatcttcctctttcagttcacctagggcgtagttcgctggttgcagggtacagttctatacgttttgacaaactcattgggtggtgccctgaccagtgctgccgtccaggtgcagaacccccagcttccctgcggcgcccccatcctcagcttgcctgggagctcctggctgctccccacctggccttacctgtagttctgccattctcagaaagttggctgaatggaatcaacagcatgttgccctttggtcctggtggctttcaggcggccaaatccgtgttgctgcaggtttcaaaagttaccccatttttttgctgactgtaaatccattggacagttgggccacagattgttgacgtgtttgcctgtgggtcacaggactgtgggctgtttccaatttttggtgattagaataaacccgcactaaacaccactggcgggatttttggtgaaagtcagtgttcgcgtggcgaggttctcaggggtggaccgcacggcctgtgctaagcgtctgtttaacatctgcatcccaacagttgccacttgtcagtgctaagaaacccactggaacccagcgtcggggcctggggtagtggtcttgccagggaccctttgccttttccttggtactgaagtgaacattcacgtgaaggcagccctggtgtccccgcccgcatgcctgctgccctgcctggccagtgctccattgtaaatagtaagggcgagagctggcgggagcgggctttctagtggtgggcgggactgtgccgtgtctttccctccctggccaggccctggcttggcagggtgtgctggtcctggcgccgtctacggcctcttcctgctctggttggcccactgccgggcccagcatcttcattcgcccaagtgccagaggcagccttctgacaacctcgccgtgacatttgtcattttctgtgttcccgttgaggaat[131 bp omitted]agctccgcctcccaggtttcagtgattctcctgcctcagcctccccagtagctgggattacagacctgtgccaccatgcctggcttattttgtatttttagtagagacagggtttcaccatattggccaggctggtctcaaactcctgacctcaggtgatccgtccacctcggcctcccagagtgctgggatgacaggcgtgaaccaccgtgcccagacgcagctgcagcagcacatttattcatgattcattccaacagcagctactgaatactcagtgttgtgggggcacagaggacaacaagccaatattctccccccgccaccgccccagcattcttagtctcaagaaacctgtcaaatgaagacaggccgggcacaggggctcatgcctgtagtccctgcactttgggaagcccaggcgggaggattgcttgagcccaggagtttgagacaagccagggcaacatagggagactccatctctaccaaaaaatttaaaacagtgaagttaagtagattataaatagaagttcagcagagatactgtgctgagtacaaggtcagctgaggtccccagggaggggctgccacttctgccctgggggacctgtgggtggctgcttggaggaggggccatccggaggaggaagcagaaatagccacaactgtccacgctcggaaatgagcagttcggaaggggtttgcccaattggcaaacgcaagggggaggaagggagatttttattcttacatgacctgggagttcctggataaccgcttttctcaagccccgcatggcatttcttatttttttgagagggaatctcgtactgttgcctgggctggagtacaacggtgtgatctcggttcactgcaacatctgcctcctgggttcaagtgattctcctgtctcagcctccccagtaggtgggactacaggcacccgccaccacgcccagctaattttttgtatttttagtagcgacaggttttcactatgttggccaggctggtctcgaactcctgaccttgtcatctacctgcctgggcctcccagagtgctaggattacaggcatgagccaccgtgcctggccctgcgtggtatttctagggcaggatggccctgcccttcttctagtgggaagggcacaagtggcattattggttgtttgctcggaaagaaccttcaaaggccacagaacgggaccttccccctggtgactcacaggctgtgggcgggcaggggcggcctccactggccaagggtccggactctctgactctcattaatgagtgagtacatgttccgcctgacagcctggcctggagcccggctgtgggcggcggtgagtgggcagccagcagtgagtagcagccggggcggggtgagctgtccccaccgtgactcagaaggtattttctgctgctgacctctgagcttgagtgtcctgagtaatcccagctcccccggaggcagattaacctttaggcagctttgtgtgagtaaaggagtcgctttaaataggaaggaataatagaaaaaacccaagtgttccgttttatagcaaatgcacactgctttgttcctgctggcctgaaagaggttgcagggggtactggggcggggaattgtccagaaactctgcagatgatacagggacactccagcctagcctctgaggagagttttttttgagacggactcgctctgtctcccaggctggagtgcagtggcccaatctcggctcactgcagcctccgcctcctgggttcaagtgattctcctgcctcagcctcccgagtagctgggattacaggtgtgagccaccacgcccagctctttttttcctttaaaaatctgcttgttatctgctgctcatcagagtgtatatttggggtaattcgagcctgtgctcccaggttgcagtcctcaaatgtggcccaaataaatgctccacttatattaattttgctccagttcctttcctttagctcgacagtgtgaatctacaattatcttaaaataaaaagtttaattaaaaaaaacacacggttgcccaggcacggtggctcatgcctgtaatcccggcactttgggaggccaaggcgggcagatcacctgcggtcaggagttcgagaccagcttggccaacatgacgaaaccccgtatttaccaaaaatacaaaaattagctgggcgtggtggcggttgcctataatccggagaattgcttgaacccgagagggggaggctgcagtgagctgagatcatgccattacactccagactggtcgacagagtgagactctgtctcaaacaaacagacaaaattagataaaggaaaaaagaatttttgttcaagtaatattggccattgatggctgcaaatcactcttggtgttacagattccaggaacaggaagatagtgtccgagaccaggatgcaggaacagatagatgcctttccacgcttgcccctggtgtggttgggaggcgtgactgaaatccttgctcttgtctctctggacctgatgcattttgcatgcctcactgggcacggactgcttggagctgtttttatcttccagcagtgtgaggtgtaggaaggacccaacacggttcctcctgtgctctccgcagtcaacacagaggagttgcggaaccagatacgggtacccggggattcatcagttctgtgtttcctactgggcagccccgattcaactcacttccagcatgtctacctcgacacaggctcagatcccacggggtaagggctcagtccccaagactcccccactttccatgccagttagaggcctcacgttgtgacctgtgcttctgagtgaccggtcggctgtaaatccaggttcccgtcacccttacctcggcttgattacattgcctcagtggctcacagaactcccgagaaacacttaggtcctttggttaatgataaaggacgatctgtgggatgcccatgaatactgagaaatggatcctcagggcaaggcatgggggaagggcccactccctccaggagtctcccggaacgtgtgtctcccgggacctgtccccctccaggagtctcctggaacctgtccccctccaagagtctcccagaacctgtcctttagagtgttgtttctctcattatttttgggatagggtcttgctttgtcacccaggctggagtgcagtggc

(The sequence listing continues in the following parts.)